(19) United States
(12) Patent Application Publication
(10) Pub. No.: US 2025/0122536 A1
(43) Pub. Date: Apr. 17, 2025

(54) NOVEL CAS9 ORTHOLOGS

(71) Applicant: PIONEER HI-BRED INTERNATIONAL, INC., JOHNSTON, IA (US)

(72) Inventors: ZHENGLIN HOU, ANKENY, IA (US); JOSHUA K. YOUNG, JOHNSTON, IA (US); GIEDRIUS GASIUNAS, VILNIUS (LT); VIRGINIJUS SIKSNYS, VILNIUS (LT)

(73) Assignee: PIONEER HI-BRED INTERNATIONAL, INC., JOHNSTON, IA (US)

(21) Appl. No.: 18/789,280

(22) Filed: Jul. 30, 2024

Related U.S. Application Data
(63) Continuation of application No. 16/282,498, filed on Feb. 22, 2019, now Pat. No. 12,084,676.
(60) Provisional application No. 62/651,991, filed on Apr. 3, 2018.
(60) Provisional application No. 62/634,257, filed on Feb. 23, 2018.

(51) Int. Cl. C12N 15/90; C12N 9/22; C12N 9/78; C12N 15/10; C12N 15/11; C12N 15/113; C12N 15/52; C12N 15/85

(52) U.S. Cl. CPC C12N 15/907; C12N 9/22; C12N 9/78; C12N 15/102; C12N 15/11; C12N 15/113; C12N 15/52; C12N 15/85; C12N 15/902; C07K 2319/00; C12N 2310/20; C12N 2800/80

(57) ABSTRACT

Compositions and methods are provided for novel Cas9 orthologs, including, but not limiting to, novel guide polynucleotide/Cas9 endonucleases complexes, single or dual guide RNAs, guide RNA elements, and Cas9 endonucleases. The present disclosure also describes methods for creating a double strand break in a target polynucleotide, methods for genome modification of a target sequence under various in vivo and in vitro conditions, in the genome of a cell, for gene editing, and for inserting a polynucleotide of interest into the genome of a cell. Also provided are nucleic acid constructs and cells having a modified target site or altered polynucleotide of interest produced by the methods described herein.

### CROSS-REFERENCE TO RELATED APPLICATIONS

[0001] This application is a continuation of U.S. application Ser. No. 16/282,498, filed on Feb. 22, 2019, which in turn claims the benefit of U.S. Provisional Application No. 62/634,257, filed on Feb. 23, 2018, and of U.S. Provisional Application No. 62/651,991, filed on Apr. 3, 2018, all of which are incorporated by reference herein in their entireties.

### FIELD OF THE INVENTION

[0002] The disclosure relates to the field of molecular biology, in particular to compositions of guide polynucleotide/endonuclease systems, and compositions and methods for modifying a polynucleotide sequence, including the genome of a cell.

### REFERENCE TO SEQUENCE LISTING SUBMITTED ELECTRONICALLY

[0003] The official copy of the sequence listing is submitted electronically as an XML formatted sequence listing with a file named 117988-US-CON-1_Sequence_Listing_ST26 created on Jul. 29, 2024 and having a size of 2930 KB and is filed concurrently with the specification. The sequence listing comprised in this XML formatted document is part of the specification and is herein incorporated by reference in its entirety.

### BACKGROUND

[0004] Recombinant DNA technology has made it possible to insert DNA sequences at targeted genomic locations and/or modify specific endogenous chromosomal sequences. Site-specific integration techniques, which employ site-specific recombination systems, as well as other types of recombination technologies, have been used to generate targeted insertions of genes of interest in a variety of organism. Genome-editing techniques such as zinc finger nucleases (ZFNs), transcription activator-like effector nucleases (TALENs), or homing meganucleases, are available for producing targeted genome perturbations, but these systems tend to have low specificity and employ nucleases that need to be redesigned for each target site, which renders them costly and time-consuming to prepare.

[0005] Newer technologies utilizing archaeal or bacterial adaptive immunity systems have been identified, called CRISPR (Clustered Regularly Interspaced Short Palindromic Repeats), which comprise different domains of effector proteins that encompass a variety of activities (DNA recognition, binding, and optionally cleavage).

[0006] Despite the identification and characterization of some of these systems, there remains a need for identifying novel effectors and systems, as well as demonstrating activity in eukaryotes, particularly animals and plants, to effect editing of endogenous and previously-introduced heterologous polynucleotides, as well as in vitro polynucleotide binding and/or modification. Most CRISPR gene editing is based almost entirely the Cas9 system derived from Streptococcus pyogenes (Barrangou and Doudna, 2016), which leaves a blunt-end overhang and effects gene editing via the recognition of a Protospacer Adjacent Motif (PAM) sequence of “NGG” on the target polynucleotide. A greater diversity of Cas9 proteins with different biophysical and biochemical characteristics, including different PAM recognition sequences, is desirable.

### SUMMARY

[0007] Compositions and methods are provided for novel Cas polynucleotides and cas polypeptides.

[0008] In some aspects, the invention provides a synthetic composition comprising a heterologous component and a polynucleotide selected from the group consisting of: a polynucleotide sharing at least 80%, between 80% and 85%, at least 85%, between 85% and 90%, at least 90%, between 90% and 95%, at least 95%, at least 96%, at least 97%, at least 98%, at least 99%, at least 99.5%, or greater than 99.5% identity with at least 50, between 50 and 100, at least 100, between 100 and 150, at least 150, between 150 and 200, at least 200, between 200 and 250, at least 250, between 250 and 300, at least 300, between 300 and 350, at least 350, between 350 and 400, at least 400, between 400 and 450, at least 500, between 500 and 550, at least 550, between 550 and 600, at least 600, between 600 and 650, at least 650, between 650 and 700, at least 700, between 700 and 750, at least 750, between 750 and 800, at least 800, between 800 and 850, at least 850, between 850 and 900, at least 900, between 900 and 950, at least 950, between 950 and 1000, at least 1000, or even than 1000 contiguous nucleotides of any of: SEQID NO: 1-85, a functional variant of any of SEQID NO: 1-85, a functional fragment of any of SEQID NO: 1-85, a gene encoding a Cas endonuclease selected from the group consisting of: SEQID NO: 86-171 and 511-1135, a gene encoding a Cas endonuclease that recognizes a PAM sequence listed in any of Tables 4-83, and a gene encoding a Cas endonuclease identified, derived, or isolated from an organism selected from the group consisting of Acetobacter aceti, Acetobacter sp. CAG: 977, Acholeplasma palmae, Acidaminococcus sp., Acidaminococcus_intestini_RyC-MR95, Acidothermus cellulolyticus, Acidovorax avenae, Acidovorax ebreus, Acidovorax sp. MR-S7, Actinobacillus capsulatus, Actinobacillus minor, Actinobacillus succinogenes, Actinobacillus suis, Actinomyces coleocanis, Actinomyces georgiae, Actinomyces meyeri, Actinomyces naeslundii, Actinomyces odontolyticus, Actinomyces sp. ICM47, Actinomyces sp. oral taxon 175, Actinomyces sp. oral taxon 180, Actinomyces sp. oral taxon 181, Actinomyces sp. oral taxon 848, Actinomyces sp. S6-Spd3, Afipia sp. P52-10, Akkermansia muciniphila, Alcanivorax pacificus, Alicycliphilus, Alicyclobacillus hesperidum, Aliiarcobacter faecis, Alistipes ihumii, Alistipes shahii, Alkaliflexus imshenetskii, Alloprevotella tannerae, Alloscardovia omnicolens, Alpha proteobacterium AAP38, Alpha proteobacterium AAP81b, Anaerococcus tetradius, Anaeromusa acidaminophila, Anoxybacillus sp. P3H1B, Aquabacterium parvum, Asinibacterium sp. or53, Azospirillum halopraeferens, Azospirillum sp. B510, Bacillus cereus, Bacillus cytotoxicus, Bacillus niameyensis, Bacillus okhensis, Bacillus pseudalcaliphilus, Bacillus smithii, bacterium BRH_c32, bacterium LF-3, bacterium P3, Bacteroidales bacterium CF, Bacteroides, Bacteroides coprophilus, Bacteroides coprosuis, Bacteroides faecis, Bacteroides fluxus, Bacteroides fragilis, Bacteroides pectinophilus, Bacteroides propionicifaciens, Bacteroides pyogenes, Bacteroides sp. 14 (A), Bacteroides timonensis, Bacteroides vulgatus, Bacteroidetes oral taxon 274, Barnesiella viscericola, Bdellovibrio exovorus, Belliella baltica, Bibersteinia trehalosi, Bifidobacterium angulatum, Bifidobacterium bifidum, Bifidobacterium bombi, Bifidobacterium callitrichos, Bifidobacterium longum, Bifidobacterium merycicum, Bifidobacterium thermophilum, Bifidobacterium tsurumiense, Blastopirellula marina, Bordetella pseudohinzii, Brevibacillus laterosporus, Bryobacter aggregatus, Burkholderiales bacterium GJ-E10, Butyrivibrio hungatei, Butyrivibrio sp. AC2005, Butyrivibrio sp. NC3005, Caenispirillum salinarum, Campylobacter coli, Campylobacter jejuni, Campylobacter peloridis, Campylobacter subantarcticus, candidate division TA06 bacterium 32_111, Candidatus Brocadia sinica, Candidatus Hepatoplasma crinochetorum Av, Candidatus Micropelagos thuwalensis, Candidatus Symbiothrix dinenymphae, Capnocytophaga canis, Capnocytophaga cynodegmi, Capnocytophaga ochracea, Capnocytophaga sp. CM59, Capnocytophaga sp. oral taxon 329, Carnobacterium funditum, Carnobacterium gallinarum, Carnobacterium sp. ZWU0011, Caviibacter abscessus, Chitinophagaceae bacterium PMP191F, Chlamydia trachomatis, Chlorobi bacterium NICIL-2, Chryseobacterium gallinarum, Chryseobacterium indologenes, Chryseobacterium sp. CF314, Chryseobacterium sp. ERMR1:04, Chryseobacterium sp. FH2, Chryseobacterium sp. Hurlbut01, Chryseobacterium sp. Leaf201, Chryseobacterium sp. Leaf394, Chryseobacterium sp. StRB126, Chryseobacterium sp. YR485, Chryseobacterium tenax, Cloacibacillus evryensis, Clostridium beijerinckii, Clostridium botulinum, Clostridium perfringens, Clostridium sp. CAG: 230, Clostridium sp. CAG: 433, Clostridium spiroforme, Collinsella sp. CAG: 289, Comamonadaceae bacterium CCH4-C5, Comamonas granuli, Coprobacter fastidiosus, Coprobacter secundus, Coprococcus catus GD/7, Coriobacteriales bacterium DNF00809, Coriobacterium glomerans, Coriobacterium_glomerans_PW2, Corynebacterium, Corynebacterium accolens, Corynebacterium camporealensis, Corynebacterium caspium, Corynebacterium diphtheriae, Corynebacterium falsenii, Corynebacterium lactis, Corynebacterium pseudodiphtheriticum, Corynebacterium vitaeruminis, Croceitalea dokdonensis, Cytophagales bacterium B6, Dechloromonas denitrificans, Defluviimonas, Demequina sediminicola, Desulfovibrio termitidis, Devosia sp. Root635, Dielma fastidiosa, Dinoroseobacter shibae, Dorea longicatena, Dysgonomonas sp. HGC4, Eggerthella sp. YY7918, Eggerthella_sp._YY7918, Eggerthellaceae bacterium AT8, Elizabethkingia anophelis, Elizabethkingia meningoseptica, Elusimicrobium minutum, Empedobacter brevis, Empedobacter falsenii, Endomicrobium proavitum, Enterococcus canis, Enterococcus cecorum, Enterococcus dispar, Enterococcus faecalis, Enterococcus faecalis OGIRF, Enterococcus faecium, Enterococcus hirae, Enterococcus italicus, Enterococcus massiliensis, Enterococcus mundtii, Enterococcus phoeniculicola, Enterococcus pseudoavium, Enterococcus thailandicus, Environmental metagenome, eubacterium dolichum, Eubacterium ramulus, Eubacterium rectale, Eubacterium sp., Eubacterium sp. CAG: 251, Eubacterium ventriosum, Eubacterium yurii subsp. margaretiae ATCC 43715, Facklamia hominis, Fibrobacter succinogenes, Filifactor alocis, Finegoldia magna, Finegoldia_magna_ATCC_29328, Firmicutes bacterium M10-2, Flavobacterium akiainvivens, Flavobacterium branchiophilum, Flavobacterium columnare, Flavobacterium daejeonense, Flavobacterium filum, Flavobacterium frigidarium, Flavobacterium psychrophilum, Flavobacterium sp. 83, Flavobacterium sp. ACAM 123, Flavobacterium sp. TAB 87, Flavobacterium suncheonense, Fluviicola taffensis, Francisella hispaniensis, Francisella philomiragia, Francisella tularensis, Fructobacillus ficulneus, Fructobacillus fructosus, Fructobacillus sp. EFB-NI, Fusobacterium necrophorum, Fusobacterium nucleatum, Fusobacterium periodonticum, Galbibacter marinus, Gallibacterium anatis, Gamma proteobacterium HdN1, Gamma proteobacterium HTCC5015, Gardnerella vaginalis, Gemella bergeri, Gemella cuniculi, Gemella haemolysans, Geobacillus sp., Globicatella sanguinis, Gluconacetobacter diazotrophicus, Gordonibacter pamelaeae, Granulicatella, Haemophilus, Haemophilus parainfluenzae, Haemophilus sputorum, Helcococcus sueciensis, Helicobacter apodemus, Helicobacter canadensis, Helicobacter cinaedi, Helicobacter fennelliae, Helicobacter muridarum, Helicobacter mustelae, Helicobacter pametensis, Helicobacter rodentium, Helicobacter typhlonius, Hugenholtzia roseola, Hyphomonas, Ignavibacterium album, Ilyobacter polytropus, Indibacter alkaliphilus, Jejuia pallidilutea, Jeotgalibaca dankookensis, Joostella marina, Kandleria vitulina, Kingella kingae, Kiritimatiella glycovorans, Kordia algicida, Kordia jejudonensis, Kurthia huakuii, Lachnobacterium bovis, Lachnospira multipara, Lachnospiraceae bacterium AC2029, Lachnospiraceae bacterium MA2020, Lachnospiraceae bacterium NK4A179, Lacinutrix jangbogonensis, Lactobacillus, Lactobacillus acidifarinae, Lactobacillus agilis, Lactobacillus animalis, Lactobacillus animalis KCTC 3501, Lactobacillus apodemi, Lactobacillus brevis, Lactobacillus buchneri, Lactobacillus cacaonum, Lactobacillus casei, Lactobacillus ceti, Lactobacillus ceti DSM 22408, Lactobacillus composti, Lactobacillus concavus, Lactobacillus coryniformis, Lactobacillus curvatus, Lactobacillus delbrueckii, Lactobacillus diolivorans, Lactobacillus farciminis, Lactobacillus fermentum, Lactobacillus floricola, Lactobacillus florum, Lactobacillus fuchuensis, Lactobacillus futsaii, Lactobacillus gastricus, Lactobacillus gorillae, Lactobacillus graminis, Lactobacillus hammesii, Lactobacillus heilongjiangensis, Lactobacillus hordei, Lactobacillus iners, Lactobacillus jensenii, Lactobacillus kefiri, Lactobacillus kunkeei, Lactobacillus lindneri, Lactobacillus mali, Lactobacillus melliventris, Lactobacillus mindensis, Lactobacillus mucosae, Lactobacillus namurensis, Lactobacillus nodensis, Lactobacillus oligofermentans, Lactobacillus otakiensis, Lactobacillus ozensis, Lactobacillus paracasei, Lactobacillus paracollinoides, Lactobacillus paragasseri, Lactobacillus pentosus, Lactobacillus plantarum, Lactobacillus psittaci, Lactobacillus rennini, Lactobacillus reuteri, Lactobacillus rhamnosus, Lactobacillus rossiae, Lactobacillus ruminis, Lactobacillus saerimneri, Lactobacillus sakei, Lactobacillus salivarius, Lactobacillus sanfranciscensis, Lactobacillus saniviri, Lactobacillus senmaizukei, Lactobacillus shenzhenensis, Lactobacillus sp., Lactobacillus sp. wkB8, Lactobacillus tucceti, Lactobacillus versmoldensis, Lactobacillus wasatchensis, Lactobacillus zymae, Lactobacillus_rhamnosus_LOCK900, Lagierella massiliensis, Lawsonella clevelandensis, Legionella pneumophila, Leptotrichia sp. oral taxon 215, Leuconostoc gelidum, Limnohabitans planktonicus, Listeria fleischmannii, Listeria ivanovii, Listeria monocytogenes, Listeria monocytogenes Lm_1880, Listeria seeligeri, Lunatimonas lonarensis, Lutibacter profundi, Mannheimia, Mannheimia massilioguelmaensis, Mannheimia sp. USDA-ARS-USMARC-1261, Massilibacterium senegalense, Megasphaera sp. UPII 135-E, Mesorhizobium sp., Mesorhizobium sp. LC103, Methylocystis sp. ATCC 49242, Methylophilus sp. 5, Methylophilus sp. OH31, Methylosinus, Methylovulum miyakonense, Mobiluncus curtisii, Mucilaginibacter paludis, Mucinivorans hirudinis, Mucispirillum schaedleri, Mycoplasma arginini, Mycoplasma canis, Mycoplasma dispar, Mycoplasma gallisepticum, Mycoplasma hyosynoviae, Mycoplasma mobile, Mycoplasma ovipneumoniae, Mycoplasma synoviae, Mycoplasma_gallisepticum_CA06, Myroides odoratus, Necropsobacter massiliensis, Neisseria arctica, Neisseria bacilliformis, Neisseria meningitidis, Neisseria sp., Neisseria sp. 74A18, Neisseria wadsworthii, Niabella soli, Nitratifractor salsuginis, Nitrosomonas sp. AL212, Novosphingobium sp. MD-1, Oceanivirga salmonicida, Oceanobacillus manasiensis, Odoribacter laneus, Oenococcus kitaharae DSM 17330, Oligella urethralis, Olsenella profusa, Olsenella sp. DNF00959, Olsenella uli, Ornithobacterium rhinotracheale, Ottowia sp. oral taxon 894, Pannonibacter phragmitetus, Parabacteroides johnsonii DSM 18315, Parabacteroides sp., Parabacteroides sp. D26, Parasutterella excrementihominis, Parvibaculum lavamentivorans, Parvimonas sp. KA00067, Pasteurella multocida, Pediococcus acidilactici, Pediococcus damnosus, Pediococcus inopinatus, Pediococcus parvulus, Pediococcus pentosaceus, Pediococcus stilesii, Pedobacter glucosidilyticus, Pelomonas sp. Root1237, Peptoniphilus duerdenii, Peptoniphilus obesi, Peptoniphilus sp. oral taxon 386, Peptostreptococcus anaerobius CAG: 621, Phascolarctobacterium succinatutens, Planococcus antarcticus, Porphyromonas catoniae, Porphyromonas gingivalis, Porphyromonas somerae, Porphyromonas sp. oral taxon 278, Prevotella amnii, Prevotella aurantiaca, Prevotella baroniae, Prevotella bivia, Prevotella buccalis, Prevotella corporis, Prevotella denticola, Prevotella disiens, Prevotella histicola, Prevotella intermedia, Prevotella loescheii, Prevotella melaninogenica, Prevotella nanceiensis, Prevotella nigrescens, Prevotella oralis, Prevotella pleuritidis, Prevotella ruminicola, Prevotella saccharolytica, Prevotella sp. C561, Prevotella sp. DNF00663, Prevotella sp. HJM029, Prevotella sp. HUN102, Prevotella sp. MSX73, Prevotella sp. oral taxon 306, Prevotella sp. oral taxon 317, Prevotella sp. P5-119, Prevotella stercorea, Propionimicrobium lymphophilum, Pseudaminobacter salicylatoxidans, Pseudomonas aeruginosa, Pseudomonas lini, Psychroflexus torquis, Psychroserpens sp. Hel_I_66, Ralstonia solanacearum, Rhodobacteraceae bacterium HLUCCA08, Rhodobacteraceae bacterium HLUCCA12, Rhodospirillum rubrum, Rhodovulum sp. PH10, Riemerella anatipestifer, Rikenella microfusus, Rikenellaceae sp., Rodentibacter pneumotropicus, Roseburia intestinalis, Roseburia sp. CAG: 197, Rothia aeria, Rothia dentocariosa, Rothia mucilaginosa, Rubritepida flocculans, Rugosibacter aromaticivorans, Ruminiclostridium cellulolyticum, Ruminococcus albus, Ruminococcus flavefaciens, Ruminococcus lactaris, Saccharibacter sp. AM169, Salegentibacter sp. Hel_I_6, Salinispira pacifica, Salinivirga cyanobacteriivorans, Salsuginibacillus kocurii, Scardovia inopinata, Scardovia wiggsiae, Schleiferia thermophila, Sedimenticola thiotaurini, Sediminibacterium sp. C3, Sharpea azabuensis, Shimia marina, Simonsiella muelleri, Skermanella aerolata, Solobacterium moorei, Sphaerochaeta globosa, Sphingobacterium spiritivorum, Sphingobium baderi, Sphingobium sp. AP49, Sphingobium sp. C100, Sphingomonas, Sphingomonas changbaiensis, Sphingomonas sanxanigenens, Sphingomonas sp. Leaf412, Sphingomonas sp. MM-1, Sphingomonas sp. SRS2, Spiroplasma apis, Spiroplasma litorale, Spiroplasma turonicum, Sporocytophaga myxococcoides, Sporolactobacillus vineae, Staphylococcus agnetis, Staphylococcus haemolyticus, Staphylococcus hominis, Staphylococcus lugdunensis, Staphylococcus microti, Staphylococcus pasteuri, Staphylococcus pseudintermedius, Staphylococcus schleiferi, Staphylococcus simulans, Staphylococcus sp. CAG: 324, Streptobacillus felis, Streptobacillus moniliformis, Streptococcus, Streptococcus agalactiae, Streptococcus anginosus, Streptococcus canis, Streptococcus constellatus, Streptococcus dysgalactiae, Streptococcus equi, Streptococcus equinus, Streptococcus gallolyticus, Streptococcus gordonii, Streptococcus henryi, Streptococcus infantarius, Streptococcus iniae, Streptococcus macacae, Streptococcus macedonicus, Streptococcus marimammalium, Streptococcus massiliensis, Streptococcus mitis, Streptococcus mutans, Streptococcus oralis, Streptococcus oralis subsp. tigurinus AZ_3a, Streptococcus orisasini, Streptococcus orisratti, Streptococcus ovis, Streptococcus parasanguinis, Streptococcus plurextorum, Streptococcus pseudopneumoniae, Streptococcus pseudoporcinus, Streptococcus pyogenes, Streptococcus ratti, Streptococcus sanguinis, Streptococcus sinensis, Streptococcus sobrinus, Streptococcus sp. C150, Streptococcus sp. C300, Streptococcus sp. HSISB1, Streptococcus sp. I-G2, Streptococcus suis, Streptococcus thermophilus, Streptococcus varani, Streptococcus_agalactiae_NEM316, Streptococcus_dysgalactiae_subsp._equisimilis_AC-2713, Streptococcus_gallolyticus_subsp._gallolyticus_ATCC_43143, Streptococcus_gordonii_str._Challis_substr._CH1, Streptococcus_mutans_GS-5, Streptococcus_salivarius_JIM8777, Streptococcus_suis_D9, Streptococcus_thermophilus_LMG_18311, Subdoligranulum sp. 4_3_54A2FAA, Sulfitobacter donghicola, Sulfuritalea hydrogenivorans, Sulfurospirillum sp., Sulfurospirillum sp. SCADC, Sulfurovum lithotrophicum, Sutterella wadsworthensis, Tamlana sedimentorum, Tannerella forsythia, Tenacibaculum maritimum, Thermithiobacillus tepidarius, Thermophagus xiamenensis, Thioalkalivibrio, Tissierellia bacterium KA00581, Tissierellia bacterium S5-A11, Tistrella mobilis, Treponema denticola, Treponema maltophilum, Treponema pedis, Treponema putidum, Treponema socranskii, Treponema_denticola_ATCC_35405, Turicibacter sp., uncultured Termite group 1 bacterium, Ureibacillus thermosphaericus, Urinacoccus massiliensis, Veillonella atypica, Veillonella magna, Veillonella parvula, Veillonella parvula ATCC 17745, Veillonella sp. 6_1_27, Veillonella sp. AS16, Veillonella sp. CAG: 933, Veillonella sp. DNF00869, Veillonella sp. DorA_A_3_16_22, Verminephrobacter aporrectodeae, Verminephrobacter eiseniae, Verrucomicrobia bacterium IMCC2613, Virgibacillus senegalensis, Weeksella massiliensis, Weeksella virosa, Weissella halotolerans, Weissella kandleri, Wolinella succinogenes, Woodsholea maritima, Yoonia vestfoldensis, and Zunongwangia profunda.

[0009] In some aspects, the invention provides a synthetic composition comprising a heterologous component and a polypeptide selected from the group consisting of: a polypeptide sharing at least 80%, between 80% and 85%, at least 85%, between 85% and 90%, at least 90%, between 90% and 95%, at least 95%, at least 96%, at least 97%, at least 98%, at least 99%, at least 99.5%, or greater than 99.5% identity with at least 50, between 50 and 100, at least 100, between 100 and 150, at least 150, between 150 and 200, at least 200, between 200 and 250, at least 250, between 250 and 300, at least 300, between 300 and 350, at least 350, between 350 and 400, at least 400, between 400 and 450, at least 500, between 500 and 550, at least 550, between 550 and 600, at least 600, between 600 and 650, at least 650, between 650 and 700, at least 700, between 700 and 750, at least 750, between 750 and 800, at least 800, between 800 and 850, at least 850, between 850 and 900, at least 900, between 900 and 950, at least 950, between 950 and 1000, at least 1000, or even than 1000 contiguous amino acids of any of any of: SEQID NO: 86-171 and 511-1135; a functional variant of any of SEQID NO: 86-171 and 511-1135; a functional fragment of any of SEQID NO: 86-171 and 511-1135; a Cas endonuclease encoded by a polynucleotide selected from the group consisting of: SEQID NO: 1-85; a Cas endonuclease that recognizes a PAM sequence listed in any of Tables 4-83; a Cas endonuclease that recognizes a PAM sequence selected from the group consisting of: NAR (G>A)WH (A>T>C)GN (C>T>R), N (C>D)V (A>S)R (G>A)TTTN (T>V), NV (A>G>C)TTTTT, NATTTTT, NN (H>G)AAAN (G>A>Y)N, N (T>V)NAAATN, NAV (A>G>C)TCNN, NN (A>S>T)NN (W>G>C)CCN (Y>R), NNAH (T>M)ACN, NGTGANN, NARN (A>K>C)ATN, NV (G>A>C)RNTTN, NN (A>B)RN (A>G>T>C)CCN, NN (A>B)NN (T>V)CCH (A>Y), NNN (H>G)NCDAA, NN (H>G)D (A>K)GGDN (A>B), NNNNCCAG, NNNNCTAA, NNNNCVGANN, N (C>D)NNTCCN, NNNNCTA, NNNNCYAA, NAGRGNY, NNGH (W>C)AAA, NNGAAAN, NNAAAAA, NTGAR (G>A)N (A>Y>G)N (Y>R), N (C>D)H (C>W)GH (Y>A)N (A>B)AN (A>T>S), NNAAACN, NNGTAM (A>C)Y, NH (A>Y)ARNN (C>W>G)N, B (C>K)GGN (A>Y>G)N NN, N (T>C>R)AGAN (A>K>C)NN, NGGN (A>T>G>C)NNN, NGGD (A>T>G)TNN, NGGAN(T>A>C>G)NN, CGGWN (T>R>C)NN, NGGWGNN, N (B>A)GGNN (T>V)NN, NNGD (A>T>G)AY (T>C)N, N (T>V)H(T>C>A)AAAAN, NRTAANN, N (H>G)CAAH (Y>A)N (Y>R)N, NATAAN (A>T>S)N, NV (A>G>C)R (A>G)ACCN, CN (C>W>G)AV (A>S)GAC, NNRNCAC, N(A>B)GGD (W>G)D (G>W)NN, BGD (G>W)GTCN(A>K>C), NAANACN, NRTHAN(A>B)N, BHN(H>G)NGN(T>M)H(Y>A), NMRN(A>Y>G)AH(C>T>A)N, NNNCACN, NARN(T>A>S)ACN, NNNNATW, NGCNGCN, NNNCATN, NAGNGCN, NARN(T>M>G)CCN, NATCCTN, NRTAAN(T>A>S)N, N(C>T>G>A)AAD(A>G>T)CNN, NAAAGNN, NNGACNN, N(T>V)NTAAD(A>T>G)N, NNGAD(G>W)NN, NGGN(W>S)NNN, N(T>V)GGD(W>G)GNN, NGGD(A>T>G)N(T>M>G)NN, NNAAAGN, N(G>H)GGDN(T>M>G)NN, NNAGAAA, NN(T>M>G)AAAAA, N(C>D)N(C>W>G)GW(T>C)D(A>G>T)AA, NAAAAYN, NRGNNNN, NATGN (H>G)TN, NNDATTT, and NATARCN(C>T>A>G); a Cas endonuclease that is capable of recognizing a PAM sequence that is one, two, three, four, five, six, seven, eight, nine, or ten nucleotides in length; a Cas endonuclease that comprises a domain at least 80%, between 80% and 85%, at least 85%, between 85% and 90%, at least 90%, between 90% and 95%, at least 95%, at least 96%, at least 97%, at least 98%, at least 99%, at least 99.5%, or greater than 99.5% identity with any of: SEQID NOs: 1136-1730; a Cas endonuclease that has an activity score, according to the identical or similar method of Example 9 or summations of position scores of the amino acid table of Table 86A, of at least 1.0, between 1.0 and 2.0, at least 2.0, between 2.0 and 3.0, at least 3.0, between 3.0 and 4.0, at least 4.0, between 4.0 and 5.0, at least 5.0, between 5.0 and 6.0, at least 6.0, between 6.0 and 7.0, at least 7.0, between 7.0 and 8.0, at least 8.0, between 8.0 and 9.0, at least 9.0, between 9.0 and 10.0, at least 10.0, or even greater than 10.0; a Cas endonuclease comprising one, two, three, four, five, six, seven, eight, nine, ten, eleven, twelve, thirteen, fourteen, fifteen, sixteen, seventeen, eighteen, nineteen, twenty, twenty-one, twenty-two, twenty-three, twenty-four, twenty-five, or twenty-six of the signature amino acids identified in Table 86B, as compared to an alignment with the relative sequence position numbers of SEQID NO: 1125; and a Cas endonuclease that is capable of forming a complex with a guide polynucleotide comprising any one of SEQID NOs: 426-510, 341-425, 141-255, or 256-340. In some aspects, the Cas9 polynucleotide has a plurality of the previously listed features.

[0010] In some aspects, the invention provides guide polynucleotide(s) and/or component(s) that is (are) capable of forming a complex with a Cas endonuclease to recognize, bind to, and optionally nick or cleave a target polynucleotide. In some aspects, the guide polynucleotide comprises a sequence at least 80%, between 80% and 85%, at least 85%, between 85% and 90%, at least 90%, between 90% and 95%, at least 95%, at least 96%, at least 97%, at least 98%, at least 99%, at least 99.5%, or greater than 99.5% identity with any of SEQID NOs: 426-510, 341-425, 171-255, or 256-340.

[0011] In some aspects, the invention provides a Cas endonuclease that is capable of creating a single strand break, or a nick in a double-stranded target polynucleotide. In some aspects, the Cas endonuclease is capable of creating a sticky-end overhang double strand break. In some aspects, the Cas endonuclease is capable of creating a blunt-end double strand break.

[0012] In some aspects, said heterologous component is selected from the group consisting of: a cell, a heterologous polynucleotide, a donor DNA molecule, a repair template polynucleotide, a heterologous polypeptide, a deaminase, a heterologous nuclease, a particle, a solid matrix, an antibody, a buffer composition, Tris, EDTA, dithiothreitol (DTT), phosphate-buffered saline (PBS), sodium chloride, magnesium chloride, HEPES, glycerol, bovine serum albumin (BSA), a salt, an emulsifier, a detergent, a chelating agent, a redox reagent, an antibody, nuclease-free water, a viscosity agent, and a Histidine tag. In some aspects, said heterologous polypeptide comprises a nuclease domain, a transcriptional activator domain, a transcriptional repressor domain, an epigenetic modification domain, a cleavage domain, a nuclear localization signal, a cell-penetrating domain, a deaminase domain, a base editing domain, a translocation domain, a marker, and a transgene. In some aspects, said heterologous polynucleotide is selected from the group consisting of: a guide polynucleotide, a chimeric guide polynucleotide, a chemically modified guide polynucleotide, a guide polynucleotide comprising both DNA and RNA, a noncoding expression element, a gene, a marker, and a polynucleotide encoding a plurality of Histidine residues. In some aspects, the synthetic composition comprises at least two, at least three, at least four, at least five, or even greater than five heterologous components. In some aspects, there is a plurality of different heterologous components. In some aspects, there is a plurality of heterologous components of the same type. In some aspects, there is a plurality of identical heterologous components.

[0013] In some aspects, the pH of the synthetic composition is between 1.0 and 14.0, between 2.0 and 13.0, between 3.0 and 12.0, between 4.0 and 11.0, between 5.0 and 10.0, between 6.0 and 9.0, between 7.0 and 8.0, between 4.5 and 6.5, between 5.5 and 7.5, or between 6.5 and 7.5. In some aspects, the Cas9 ortholog has an activity optimum at a pH between 1.0 and 14.0, between 2.0 and 13.0, between 3.0 and 12.0, between 4.0 and 11.0, between 5.0 and 10.0, between 6.0 and 9.0, between 7.0 and 8.0, between 4.5 and 6.5, between 5.5 and 7.5, or between 6.5 and 7.5.

[0014] In some aspects, said Cas9 ortholog has an activity optimum at a temperature between 0 degrees Celsius and 100 degrees Celsius, between at least 0 degrees Celsius and 10 degrees Celsius, between at least 10 degrees Celsius and 20 degrees Celsius, between at least 20 degrees Celsius and 25 degrees Celsius, between at least 25 degrees Celsius and 30 degrees Celsius, between at least 30 degrees Celsius and 40 degrees Celsius, between at least 40 degrees Celsius and 50 degrees Celsius, between at least 50 degrees Celsius and 60 degrees Celsius, between at least 60 degrees Celsius and 70 degrees Celsius, between at least 70 degrees Celsius and 80 degrees Celsius, between at least 80 degrees Celsius and 90 degrees Celsius, between at least 90 degrees Celsius and 100 degrees Celsius, or greater than 100 degrees Celsius.

[0015] In some aspects, the synthetic composition is stored or incubated at a temperature of at least minus 200 degrees Celsius, at least minus 150 degrees Celsius, at least minus 135 degrees Celsius, at least minus 90 degrees Celsius, at least minus 80 degrees Celsius, at least minus 20 degrees Celsius, at least 4 degrees Celsius, at least 17 degrees Celsius, at least 25 degrees Celsius, at least 30 degrees Celsius, at least 35 degrees Celsius, at least 37 degrees Celsius, at least 39 degrees Celsius, or greater than 39 degrees Celsius.

[0016] In some aspects, any of the synthetic compositions may be in a substantially nuclease-free environment. In some aspects, any of the synthetic compositions may be in a substantially endotoxin-free environment. In some aspects, any of the synthetic compositions may be in a substantially nuclease-free and endotoxin-free environment. In some aspects, any of the synthetic compositions may be lyophilized. In some aspects, any of the synthetic compositions may exist in an aqueous solution. In some aspects, any of the synthetic compositions may exist in a non-aqueous solution.

[0017] In one aspect, the invention provides a method of modulating target polynucleotide specificity of a Cas9 ortholog/guide polynucleotide complex as compared to its wild type activity, by changing a parameter selected from the group consisting of: guide polynucleotide length, guide polynucleotide composition, length of PAM recognition sequence, composition of the PAM recognition sequence, and affinity of the Cas9 molecule with the target polynucleotide backbone; and assessing the target polynucleotide specificity of the complex with the changed parameter, and comparing it to the activity of a complex with wild type parameters. In some embodiments, target polynucleotide specificity may be increased with a longer PAM recognition sequence. In some embodiments, target polynucleotide specificity may be decreased with a shorter PAM recognition sequence. In some embodiments, target polynucleotide specificity may be modulated by engineering a non-naturally occurring PAM recognition sequence.

[0018] In one aspect, the invention provides a method of optimizing the activity of a Cas9 molecule by subjecting a parental Cas9 molecule to at least one round of stochastic protein shuffling or molecular evolution, and selecting a resultant molecule that has at least one characteristic not present in the parental Cas9 molecule. In some embodiments, multiple rounds may be performed.

[0019] In one aspect, the invention provides a method of optimizing the activity of a Cas9 molecule by subjecting a parental Cas9 molecule to at least one round of non-stochastic protein shuffling or molecular evolution, and selecting a resultant molecule that has at least one characteristic not present in the parental Cas9 molecule. In some embodiments, multiple rounds may be performed.

[0020] In one aspect, the invention provides, using any of the compositions provided herein or any composition derived from the compositions provided herein or any composition identified using any of the methods provided herein, methods of effecting a single-strand nick or a double-strand break of a target polynucleotide, methods of modifying an isolated or genomic polynucleotide, methods of in vitro polynucleotide modification, methods of in vivo polynucleotide modification, methods of editing one or more bases of a polynucleotide, methods of modulating the expression of an endogenous or transgenic polynucleotide in a cell, or methods of conferring a benefit to a cell, tissue, or organism to which the composition has been introduced.

[0021] Methods of genomic modification provided herein include the insertion of at least one nucleotide, the deletion of at least one nucleotide, the modification of at least one nucleotide, the swap of at least one nucleotide, the chemical alteration of at least one nucleotide, the deamination of at least one nucleotide, or any combination of the preceding.

[0022] In some aspects, the Cas endonuclease has been modified to alter its wild type activity, to cleave a target polynucleotide with greater frequency, to cleave a polynucleotide with less frequency, or to reduce or eliminate nuclease activity.

[0023] In some aspects, the Cas endonuclease is combined with another polypeptide to create a fusion protein, for example with a deaminase or a heterologous nuclease.

[0024] In any aspect of the methods or compositions provided herein, the cell may be selected from the group consisting of: a human, non-human primate, mammal, animal, archaeal, bacterial, protist, fungal, insect, yeast, non-conventional yeast, and plant cell. In some embodiments, the cell is heterologous to the organism from which the Cas9 endonuclease was derived. In some embodiments, the cell is a plant cell selected from the group consisting of a monocot and dicot cell. In some embodiments, the cell is a plant cell selected from the group consisting of maize, rice, sorghum, rye, barley, wheat, millet, oats, sugarcane, turfgrass, switchgrass, soybean, canola, alfalfa, sunflower, cotton, tobacco, peanut, potato, tobacco, Arabidopsis, vegetable, and safflower cell. In some embodiments, the cell is an animal cell, optionally a mammalian cell, optionally a primate cell, or optionally a human cell, that is selected from the group consisting of: haploid cells, diploid cells, reproductive cells, neurons, muscle cells, endocrine or exocrine cells, epithelial cells, muscle cells, tumor cells, embryonic cells, hematopoietic cells, bone cells, germ cells, somatic cells, stem cells, pluripotent stem cells, induced pluripotent stem cells, progenitor cells, meiotic cells, and mitotic cells.

[0025] In any aspect, a benefit is conferred to said cell, or organism comprising said cell, or subsequent generation of cells or organisms derived from said cell, as a result of a composition or method provided herein. In some embodiments, the benefit is ascertained by comparing said cell, organism comprising said cell, or subsequent generation of cells or organisms derived from said cell, to an isoline cell not subjected to a method provided herein, or not comprising at least one composition provided herein. In some embodiments, the benefit is provided as a result of a polynucleotide modification, deletion, or, insertion. In some embodiments, said benefit is selected from the group consisting of: improved health, improved growth, improved fertility, improved fecundity, improved environmental tolerance, improved vigor, improved disease resistance, improved disease tolerance, improved tolerance to a heterologous molecule, improved fitness, improved physical characteristic, greater mass, increased production of a biochemical molecule, decreased production of a biochemical molecule, upregulation of a gene, downregulation of a gene, upregulation of a biochemical pathway, downregulation of a biochemical pathway, stimulation of cell reproduction, and suppression of cell reproduction, as compared to an isoline plant not comprising or derived from a cell comprising said donor polynucleotide. In some embodiments, the modification of said target site results in the modulation of a trait of agronomic interest of a plant comprising, or derived from, said cell or a progeny cell thereof, said trait of agronomic interest selected from the group consisting of: disease resistance, drought tolerance, heat tolerance, cold tolerance, salinity tolerance, metal tolerance, herbicide tolerance, improved water use efficiency, improved nitrogen utilization, improved nitrogen fixation, pest resistance, herbivore resistance, pathogen resistance, yield improvement, health enhancement, improved fertility, vigor improvement, growth improvement, photosynthetic capability improvement, nutrition enhancement, altered protein content, altered oil content, increased biomass, increased shoot length, increased root length, improved root architecture, modulation of a metabolite, modulation of the proteome, increased seed weight, altered seed carbohydrate composition, altered seed oil composition, altered seed protein composition, altered seed nutrient composition; as compared to an isoline plant not comprising or derived from a cell comprising said donor polynucleotide. In some embodiments, the cell is an animal cell, wherein the modification of said target site results in the modulation of a phenotype of physiological interest of an organism comprising said animal cell or a progeny cell thereof, selected from the group consisting of: improved health, improved nutritional status, reduced disease impact, disease stasis, disease reversal, improved fertility, improved vigor, improved mental capacity, improved organism growth, improved weight gain, weight loss, modulation of an endocrine system, modulation of an exocrine system, reduced tumor size, reduced tumor mass, stimulated cell growth, reduced cell growth, production of a metabolite, production of a hormone, production of an immune cell, and stimulation of cell production.

### BRIEF DESCRIPTION OF THE DRAWINGS AND THE SEQUENCE LISTING

[0026] The disclosure can be more fully understood from the following detailed description and the accompanying drawings and Sequence Listing, which form a part of this application. The sequence descriptions and sequence listing attached hereto comply with the rules governing nucleotide and amino acid sequence disclosures in patent applications as set forth in 37 C.F.R. §§ 1.821 and 1.825. The sequence descriptions comprise the three letter codes for amino acids as defined in 37 C.F.R. §§ 1.821 and 1.825, which are incorporated herein by reference.

### FIGURES

[0027] FIG. 1 is a graphical representation of the phylogram generated to identify the 12 clades described in Example 1.

[0028] FIG. 2 depicts the secondary structure diagrams of the guide RNA molecules identified for some of the Cas9 orthologs of each of the 12 clades described in Example 1.

[0029] FIG. 3 shows the consensus PAM sequences determined for some of the Cas9 orthologs of each of the 12 clades described in Example 1, as detailed in Tables 4-83.

[0030] FIG. 4 shows the consensus sequence for Group I Cas9 orthologs (SEQ ID NOs: 58, 62, 64, 63, 65, 71, 69, 74, 66, 67, 70, 72, 73, 68, 83, 79, 82, 76, 78, 80, 81, 77, and 75), which were aligned against the Staphylococcus aureus Cas9 structure PDB ID 5CZZ_A (“Crystal structure of Staphylococcus aureus Cas9”, Nishimasu, H., Cong, L., Yan, W. X., Ran, F. A., Zetsche, B., Li, Y., Kurabayashi, A., Ishitani, R., Zhang, F., Nureki, O., (2015) Cell 162:1113-1126). Absolutely conserved residues are depicted in bold, underlined text (X).

[0031] FIG. 5 shows the consensus sequence for Group III Cas9 orthologs (SEQ ID NOs: 51, 52, 53, 54, 55, 56, 57, 59, 84, 85, 86, 87, 88, 89, 90, 91, 92, 93, 94, 95, 96, and 97), which aligned against the Streptococcus pyogenes serotype M1 structure PDB ID 4UN3_B (“Structural Basis of Pam-Dependent Target DNA Recognition by the Cas9 Endonuclease”, Anders, C., Niewoehner, O., Duerst, A., Jinek, M., (2014) Nature 513:569-573). Absolutely conserved residues are depicted in bold, underlined text (X).

[0032] FIG. 6 shows the consensus sequence for Group IV Cas9 orthologs (SEQ ID NOs: 98 and 99), which were aligned against the Actinomyces naeslundii structure PDB ID 4OGE_A (“Structures of Cas9 endonucleases reveal RNA-mediated conformational activation”, Jinek, M., Jiang, F., Taylor, D. W., Sternberg, S. H., Kaya, E., Ma, E., Anders, C., Hauer, M., Zhou, K., Lin, S., Kaplan, M., Iavarone, A. T., Charpentier, E., Nogales, E., Doudna, J. A., (2014) Science 343:1247997-1247997). Absolutely conserved residues are depicted in bold, underlined text (X).

[0033] FIGS. 7A and 7B show the experimental approaches described in Example 9 for testing the HDR frequency after cleavage with Cas9: FIG. 7A depicts HDR via duplicated region of fluorescent reporter, and FIG. 7B depicts the repair template introduced together with Cas9.

[0034] FIG. 8 shows WebLogo comparisons for selected Cas9 orthologs across two different methods (IVT and RNP). IVT method results were confirmed with purified ribonucleoprotein (RNP), at several different concentrations.

[0035] FIGS. 9A, 9B, and 9C show Protospacer-adapter ligation positions where Illumina sequences were recovered in excess resulting in a peak or spike of read coverage over negative controls were denoted as the cleavage position, with numerical results as fraction of adapter ligated reads. FIG. 9A shows the results for selected sequences of Clades I, II, III, and V. FIG. 9B shows the results for selected sequences of Clades VI, VII, VIII, and IX. FIG. 9C shows the results for selected sequences of Clades X, XI, and XII.

[0036] FIG. 10A shows those Cas9 proteins that produced dominant cleavage at a protospacer position other than just after 3 were then re-examined by also capturing the cleavage product resulting from cleavage, end-repair, 3′ adenine addition, and adapter ligation of protospacer side of the cleaved library target.

[0037] FIG. 10B shows the position and type of cleavage, based on the resulting frequencies compared for both the protospacer and PAM sides of cleavage, taking T4 DNA polymerase end-repair into consideration, for eight of the selected Cas9 orthologs that demonstrated sticky-end cleavage.

[0038] FIG. 11 shows in vitro cleavage data for some of the Cas9 orthologs tested with two different lengths of spacers (20 nucleotides and 24 nucleotides) in five different buffer compositions.

[0039] FIGS. 12A and 12B show in vitro cleavage data for selected Cas9 orthologs using the S. pyogenes sgRNA. FIG. 12A depicts in vitro cleavage data for ID64, ID67, ID68, ID70, ID102, and the control S. pyogenes Cas9. FIG. 12B depicts in vitro cleavage data for ID102 at the WTAP and FANCF1 loci.

[0040] FIG. 13 shows in vitro cleavage activity versus temperature for one of the Cas9 orthologs, ID46, showing a wide range of temperature activity, with optimal activity from about 15 degrees Celsius to about 60 degrees Celsius with a 24 nucleotide spacer length, and a narrow window of activity with a maximum at approximately 45 degrees Celsius with a 20 nucleotide spacer length.

[0041] FIG. 14 shows the average NHEJ frequency in maize cells two days after transformation, with a representative number of Cas9 orthologs.

[0042] FIGS. 15A and 15B show the expected cut sites in 20 different mutants generated by selected Cas9 orthologs. FIG. 15A shows the results for ID33, and FIG. 15B shows the results for ID64.

[0043] FIGS. 16A and 16B show the % TO plants with mono- and bi-allelic mutations (FIG. 16A) and bi-allelic mutations (FIG. 16B) results of two different Cas9 orthologs (ID33 and ID64) across three different target sites (MS45, MS26, and LIG) in maize T0 plants, as compared to control plants modified with S. pyogenes Cas9.

[0044] FIG. 17 shows the results of selected Cas9 orthologs at the HEK cell WTAP locus, as compared to the activity of S. pyogenes Cas9, in cells transformed with a recombinant construct comprising a DNA sequence encoding the respective Cas9 ortholog.

[0045] FIG. 18 shows the results of selected Cas9 orthologs at the HEK cell RunX1 locus, as compared to the activity of S. pyogenes Cas9, in cells transformed with a recombinant construct comprising a DNA sequence encoding the respective Cas9 ortholog.

[0046] FIGS. 19A and 19B show the expected cut sites in 20 different mutants generated by selected Cas9 orthologs. FIG. 19A shows the results for ID46 and FIG. 19B shows the results for ID56, in maize cells.

[0047] FIG. 20 shows the results of selected Cas9 orthologs at the HEK cell WTAP locus, as compared to the activity of S. pyogenes Cas9, in cells transformed with ribonucleoprotein comprising the respective Cas9 ortholog and its appropriate guide RNA.

[0048] FIG. 21 shows the activity score plot of Cas9 orthologs, as described in Example 9.

### SEQUENCES

[0049] SEQID NOs: 1-85 are the polynucleotide sequences encoding the Cas9 ortholog sequences SEQ IDs 86-170, respectively, with the Cas9 Ortholog ID numbers, source organisms, and phylogeny Clades described in Table 1.

[0050] SEQ ID NOs: 86-170 and 511-1135 are polypeptide sequences encoding the Cas9 orthologs represented in FIG. 1.

[0051] SEQ ID NOs: 171-255 are the crRNA repeat sequences corresponding to the Cas9 orthologs of SEQ IDs 86-170, respectively.

[0052] SEQ ID NOs: 256-340 are the anti-repeat sequences corresponding to the Cas9 orthologs of SEQ IDs 86-170, respectively.

[0053] SEQ ID NOs: 341-425 are the 3′ tracrRNA sequences corresponding to the Cas9 orthologs of SEQ IDs 86-170, respectively.

[0054] SEQ ID NOs: 426-510 are the CER domains of the sgRNAs sequences corresponding to the Cas9 orthologs of SEQ IDs 86-170, respectively.

[0055] SEQ ID NOs: 1136-1220 are the protein sequences of the REC domains for the Cas9 ortholog ID numbers listed in Table 2B.

[0056] SEQ ID NOs: 1221-1305 are the protein sequences of the RUVC1 domains for the Cas9 ortholog ID numbers listed in Table 2B.

[0057] SEQ ID NOs: 1306-1390 are the protein sequences of the RUVC2 domains for the Cas9 ortholog ID numbers listed in Table 2B.

[0058] SEQ ID NOs: 1391-1475 are the protein sequences of the RUVC3 domains for the Cas9 ortholog ID numbers listed in Table 2B.

[0059] SEQ ID NOs: 1476-1560 are the protein sequences of the HNH domains for the Cas9 ortholog ID numbers listed in Table 2B.

[0060] SEQ ID NOs: 1561-1645 are the protein sequences of the WED domains for the Cas9 ortholog ID numbers listed in Table 2B.

[0061] SEQ ID NOs: 1646-1730 are the protein sequences of the PI domains for the Cas9 ortholog ID numbers listed in Table 2B.

[0062] SEQID NO: 1731 is the DNA sequence for Adapter A1.

[0063] SEQID NO: 1732 is the DNA sequence for Adapter A2.

[0064] SEQID NO: 1733 is the DNA sequence for R0 primer.

[0065] SEQID NO: 1734 is the DNA sequence for C0 primer.

[0066] SEQID NO: 1735 is the DNA sequence for F1 primer.

[0067] SEQID NO: 1736 is the DNA sequence for R1 primer.

[0068] SEQID NO: 1737 is the DNA sequence for 5′ end bridge amplification sequence.

[0069] SEQID NO: 1738 is the DNA sequence for 3′ end bridge amplification sequence.

[0070] SEQID NO: 1739 is the DNA sequence for F2 primer.

[0071] SEQID NO: 1740 is the DNA sequence for R2 primer.

[0072] SEQID NO: 1741 is the DNA sequence for C1 primer.

[0073] SEQID NO: 1742 is the DNA sequence for a sequence product.

[0074] SEQID NO: 1743 is the DNA sequence for an adapter and target.

[0075] SEQID NO: 1744 is the DNA sequence for a 5′ sequence upstream of the PAM.

[0076] SEQID NOs: 1746 is the DNA target sequence for the ID33 WT cleavage pattern.

[0077] SEQID NOs: 1747-1766 are the top 20 target sequence cleavage patterns for ID33.

[0078] SEQID NOs: 1767 is the DNA target sequence for the ID64 WT cleavage pattern.

[0079] SEQID NOs: 1768-1787 are the top 20 target sequence cleavage patterns for ID64.

[0080] SEQID NOs: 1788 is the DNA target sequence for the ID46 WT cleavage pattern.

[0081] SEQID NOs: 1789-1808 are the top 20 target sequence cleavage patterns for ID46.

[0082] SEQID NOs: 1809 is the DNA target sequence for the ID56 WT cleavage pattern.

[0083] SEQID NOs: 1810-1829 are the top 20 target sequence cleavage patterns for ID56.

### DETAILED DESCRIPTION

[0084] Compositions are provided for novel Cas9 systems and elements comprising such systems, including, but not limiting to, novel guide polynucleotide/Cas endonucleases complexes, single guide RNAs, guide RNA elements, and Cas9 endonucleases. The present disclosure further includes compositions and methods for genome modification of a target sequence in the genome of a cell, for gene editing, and for inserting a polynucleotide of interest into the genome of a cell.

[0085] Compositions and methods are also provided for direct delivery of endonucleases, Cas proteins, guide RNAs and guide RNA/endonuclease complexes. The present disclosure further includes compositions and methods for genome modification of a target sequence in the genome of a cell, for gene editing, and for inserting a polynucleotide of interest into the genome of a cell.

[0086] Compositions and methods are also provided for in vitro characterization and modification of an isolated polynucleotide.

[0087] Given the diversity of Type II CRISPR-Cas systems (Fonfara et al. (2014) Nucleic Acids Res. 42:2577-2590), it is plausible that many of the Cas9 endonucleases and cognate guide RNAs may have unique sequence recognition and enzymatic properties different from those previously described or characterized. For example, cleavage activity and specificity may be enhanced or proto-spacer adjacent motif (PAM) sequence may be different leading to increased genomic target site density. To tap into this vast unexplored diversity and expand the repertoire of Cas9 endonucleases and cognate guide RNAs available for genome targeting, the two components of Cas9 target site recognition, the PAM sequence and the guide RNA (either duplexed CRISPR RNA (crRNA) and trans-activating CRISPR RNA (tracrRNA) or chimeric fusion of crRNA and tracrRNA (single guide RNA (sgRNA), need to be established for each new system.

[0088] As described herein, CRISPR-Cas loci (including Cas9 genes and open reading frames, CRISPR array and anti-repeats) from uncharacterized CRISPR-Cas systems were identified by searching internal Pioneer-DuPont databases consisting of microbial genomes. The Cas9 endonuclease described herein can be expressed and purified by methods known in the art. As described herein, the transcriptional direction of the tracrRNA for all the CRISPR-Cas systems can be deduced and examples of sgRNAs and its components (Variable Targeting domain (VT)), crRNA repeat, loop, anti-repeat and 3′ tracrRNA) were identified for each new diverse CRISPR-Cas endonuclease described herein.

[0089] Terms used in the claims and specification are defined as set forth below unless otherwise specified. It must be noted that, as used in the specification and the appended claims, the singular forms “a,” “an” and “the” include plural referents unless the context clearly dictates otherwise.

### Definitions

[0090] As used herein, “nucleic acid” means a polynucleotide and includes a single or a double-stranded polymer of deoxyribonucleotide or ribonucleotide bases. Nucleic acids may also include fragments and modified nucleotides. Thus, the terms “polynucleotide”, “nucleic acid sequence”, “nucleotide sequence” and “nucleic acid fragment” are used interchangeably to denote a polymer of RNA and/or DNA and/or RNA-DNA that is single- or double-stranded, optionally comprising synthetic, non-naturally occurring, or altered nucleotide bases. Nucleotides (usually found in their 5′-monophosphate form) are referred to by their single letter designation as follows: “A” for adenosine or deoxyadenosine (for RNA or DNA, respectively), “C” for cytosine or deoxycytosine, “G” for guanosine or deoxyguanosine, “U” for uridine, “T” for deoxythymidine, “R” for purines (A or G), “Y” for pyrimidines (C or T), “K” for G or T, “H” for A or C or T, “I” for inosine, and “N” for any nucleotide.

[0091] The term “genome” as it applies to a prokaryotic and eukaryotic cell or organism cells encompasses not only chromosomal DNA found within the nucleus, but organelle DNA found within subcellular components (e.g., mitochondria, or plastid) of the cell.

[0092] “Open reading frame” is abbreviated ORF.

[0093] The term “selectively hybridizes” or “selective hybridization” includes reference to hybridization, under stringent hybridization conditions, of a nucleic acid sequence to a specified nucleic acid target sequence to a detectably greater degree (e.g., at least 2-fold over background) than its hybridization to non-target nucleic acid sequences and to the substantial exclusion of non-target nucleic acids. Selectively hybridizing sequences typically have about at least 80% sequence identity, or 90% sequence identity, up to and including 100% sequence identity (i.e., fully complementary) with each other.

[0094] The term “stringent conditions” or “stringent hybridization conditions” includes reference to conditions under which a polynucleotide/probe will selectively hybridize to its target sequence in an in vitro hybridization assay. Stringent conditions are sequence-dependent and will be different in different circumstances. By controlling the stringency of the hybridization and/or washing conditions, target sequences can be identified which are 100% complementary to the polynucleotide/probe (homologous probing). Alternatively, stringency conditions can be adjusted to allow some mismatching in sequences so that lower degrees of similarity are detected (heterologous probing). Generally, a polynucleotide/probe is fewer than about 1000 nucleotides in length, fewer than 500 nucleotides, fewer than 100 nucleotides, fewer than 90 nucleotides, fewer than 80 nucleotides, fewer than 70 nucleotides, fewer than 60 nucleotides, fewer than 50 nucleotides, fewer than 40 nucleotides, fewer than 30 nucleotides, fewer than 20 nucleotides, 10 nucleotides, or even fewer than 10 nucleotides. Typically, stringent conditions will be those in which the salt concentration is less than about 1.5 M Na ion, typically about 0.01 to 1.0 M Na ion concentration (or other salt(s)) at pH 7.0 to 8.3, and at least 30° C. for short polynucleotides/probes (e.g., 10 to 50 nucleotides) and at least 60° C. for long polynucleotides/probes (e.g., greater than 50 nucleotides). Stringent conditions may also be achieved with the addition of destabilizing agents such as formamide. Exemplary low stringency conditions include hybridization with a buffer solution of 30 to 35% formamide, 1 M NaCl, 1% SDS (sodium dodecyl sulfate) at 37° C., and a wash in 1× to 2×SSC (20×SSC=3.0 M NaCl/0.3 M trisodium citrate) at 50 to 55° C. Exemplary moderate stringency conditions include hybridization in 40 to 45% formamide, 1 M NaCl, 1% SDS at 37° C., and a wash in 0.5× to 1×SSC at 55 to 60° C. Exemplary high stringency conditions include hybridization in 50% formamide, 1 M NaCl, 1% SDS at 37° C., and a wash in 0.1×SSC at 60 to 65° C.

[0095] By “homology” is meant DNA sequences that are similar. For example, a “region of homology to a genomic region” that is found on the donor DNA is a region of DNA that has a similar sequence to a given “genomic region” in the cell or organism genome. A region of homology can be of any length that is sufficient to promote homologous recombination at the cleaved target site. For example, the region of homology can comprise at least 5-10, 5-15, 5-20, 5-25, 5-30, 5-35, 5-40, 5-45, 5-50, 5-55, 5-60, 5-65, 5-70, 5-75, 5-80, 5-85, 5-90, 5-95, 5-100, 5-200, 5-300, 5-400, 5-500, 5-600, 5-700, 5-800, 5-900, 5-1000, 5-1100, 5-1200, 5-1300, 5-1400, 5-1500, 5-1600, 5-1700, 5-1800, 5-1900, 5-2000, 5-2100, 5-2200, 5-2300, 5-2400, 5-2500, 5-2600, 5-2700, 5-2800, 5-2900, 5-3000, 5-3100 or more bases in length such that the region of homology has sufficient similarity to undergo homologous recombination with the corresponding genomic region. “Sufficient similarity” indicates that two polynucleotide sequences have sufficient structural equivalency to act as substrates for a homologous recombination reaction. The structural equivalency includes overall length of each polynucleotide fragment, as well as the sequence similarity of the polynucleotides. Sequence similarity can be described by the percent sequence identity over the whole length of the sequences, and/or by conserved regions comprising localized similarities such as contiguous nucleotides having 100% sequence identity, and percent sequence identity over a portion of the length of the sequences.

[0096] As used herein, a “genomic region” is a segment of a chromosome in the genome of a cell that is present on either side of a target site or, alternatively, also comprises a portion of a target site. The genomic region can comprise at least 5-10, 5-15, 5-20, 5-25, 5-30, 5-35, 5-40, 5-45, 5-50, 5-55, 5-60, 5-65, 5-70, 5-75, 5-80, 5-85, 5-90, 5-95, 5-100, 5-200, 5-300, 5-400, 5-500, 5-600, 5-700, 5-800, 5-900, 5-1000, 5-1100, 5-1200, 5-1300, 5-1400, 5-1500, 5-1600, 5-1700, 5-1800, 5-1900, 5-2000, 5-2100, 5-2200, 5-2300, 5-2400, 5-2500, 5-2600, 5-2700, 5-2800, 5-2900, 5-3000, 5-3100 or more bases such that the genomic region has sufficient similarity to undergo homologous recombination with the corresponding region of homology.

[0097] As used herein, “homologous recombination” (HR) includes the exchange of DNA fragments between two DNA molecules at the sites of homology. The frequency of homologous recombination is influenced by a number of factors. Different organisms vary with respect to the amount of homologous recombination and the relative proportion of homologous to non-homologous recombination. Generally, the length of the region of homology affects the frequency of homologous recombination events: the longer the region of homology, the greater the frequency. The length of the homology region needed to observe homologous recombination is also species-variable. In many cases, at least 5 kb of homology has been utilized, but homologous recombination has been observed with as little as 25-50 bp of homology. See, for example, Singer et al., (1982) Cell 31:25-33; Shen and Huang, (1986) Genetics 112:441-57; Watt et al., (1985) Proc. Natl. Acad. Sci. USA 82:4768-72, Sugawara and Haber, (1992) Mol Cell Biol 12:563-75, Rubnitz and Subramani, (1984) Mol Cell Biol 4:2253-8; Ayares et al., (1986) Proc. Natl. Acad. Sci. USA 83:5199-203; Liskay et al., (1987) Genetics 115:161-7.

[0098] “Sequence identity” or “identity” in the context of nucleic acid or polypeptide sequences refers to the nucleic acid bases or amino acid residues in two sequences that are the same when aligned for maximum correspondence over a specified comparison window.

[0099] The term “percentage of sequence identity” refers to the value determined by comparing two optimally aligned sequences over a comparison window, wherein the portion of the polynucleotide or polypeptide sequence in the comparison window may comprise additions or deletions (i.e., gaps) as compared to the reference sequence (which does not comprise additions or deletions) for optimal alignment of the two sequences. The percentage is calculated by determining the number of positions at which the identical nucleic acid base or amino acid residue occurs in both sequences to yield the number of matched positions, dividing the number of matched positions by the total number of positions in the window of comparison and multiplying the results by 100 to yield the percentage of sequence identity. Useful examples of percent sequence identities include, but are not limited to, 50%, 55%, 60%, 65%, 70%, 75%, 80%, 85%, 90%, 95%, 96%, 97%, 98%, 99%, 100%, or any incremental or fractional percentage from 50% to 100%. These identities can be determined using any of the programs described herein.

[0100] Sequence alignments and percent identity or similarity calculations may be determined using a variety of comparison methods designed to detect homologous sequences including, but not limited to, the MegAlign™ program of the LASERGENE bioinformatics computing suite (DNASTAR Inc., Madison, WI). Within the context of this application it will be understood that where sequence analysis software is used for analysis, that the results of the analysis will be based on the “default values” of the program referenced, unless otherwise specified. As used herein “default values” will mean any set of values or parameters that originally load with the software when first initialized.

[0101] The “Clustal V method of alignment” corresponds to the alignment method labeled Clustal V (described by Higgins and Sharp, (1989) CABIOS 5:151-153; Higgins et al., (1992) Comput Appl Biosci 8:189-191) and found in the MegAlign™ program of the LASERGENE bioinformatics computing suite (DNASTAR Inc., Madison, WI). For multiple alignments, the default values correspond to GAP PENALTY=10 and GAP LENGTH PENALTY=10. Default parameters for pairwise alignments and calculation of percent identity of protein sequences using the Clustal method are KTUPLE=1, GAP PENALTY=3, WINDOW=5 and DIAGONALS SAVED=5. For nucleic acids these parameters are KTUPLE-2, GAP PENALTY=5, WINDOW=4 and DIAGONALS SAVED=4. After alignment of the sequences using the Clustal V program, it is possible to obtain a “percent identity” by viewing the “sequence distances” Table in the same program. The “Clustal W method of alignment” corresponds to the alignment method labeled Clustal W (described by Higgins and Sharp, (1989) CABIOS 5:151-153; Higgins et al., (1992) Comput Appl Biosci 8:189-191) and found in the MegAlign™ v6.1 program of the LASERGENE bioinformatics computing suite (DNASTAR Inc., Madison, WI). Default parameters for multiple alignment (GAP PENALTY=10, GAP LENGTH PENALTY=0.2, Delay Divergen Seqs (%)=30, DNA Transition Weight=0.5, Protein Weight Matrix=Gonnet Series, DNA Weight Matrix=IUB). Unless otherwise stated, sequence identity/similarity values provided herein refer to the value obtained using GAP Version 10 (GCG, Accelrys, San Diego, CA) using the following parameters: % identity and % similarity for a nucleotide sequence using a gap creation penalty weight of 50 and a gap length extension penalty weight of 3, and the nwsgapdna.cmp scoring matrix; % identity and % similarity for an amino acid sequence using a GAP creation penalty weight of 8 and a gap length extension penalty of 2, and the BLOSUM62 scoring matrix (Henikoff and Henikoff, (1989) Proc. Natl. Acad. Sci. USA 89:10915). GAP uses the algorithm of Needleman and Wunsch, (1970) J Mol Biol 48:443-53, to find an alignment of two complete sequences that maximizes the number of matches and minimizes the number of gaps. GAP considers all possible alignments and gap positions and creates the alignment with the largest number of matched bases and the fewest gaps, using a gap creation penalty and a gap extension penalty in units of matched bases. “BLAST” is a searching algorithm provided by the National Center for Biotechnology Information (NCBI) used to find regions of similarity between biological sequences. The program compares nucleotide or protein sequences to sequence databases and calculates the statistical significance of matches to identify sequences having sufficient similarity to a query sequence such that the similarity would not be predicted to have occurred randomly. BLAST reports the identified sequences and their local alignment to the query sequence. It is well understood by one skilled in the art that many levels of sequence identity are useful in identifying polypeptides from other species or modified naturally or synthetically wherein such polypeptides have the same or similar function or activity. Useful examples of percent identities include, but are not limited to, 50%, 55%, 60%, 65%, 70%, 75%, 80%, 85%, 90%, 95%, 96%, 97%, 98%, 99%, 100%, or any incremental or fractional percentage from 50% to 100%. Indeed, any amino acid identity from 50% to 100% may be useful in describing the present disclosure, such as 51%, 52%, 53%, 54%, 55%, 56%, 57%, 58%, 59%, 60%, 61%, 62%, 63%, 64%, 65%, 66%, 67%, 68%, 69%, 70%, 71%, 72%, 73%, 74%, 75%, 76%, 77%, 78%, 79%, 80%, 81%, 82%, 83%, 84%, 85%, 86%, 87%, 88%, 89%, 90%, 91%, 92%, 93%, 94%, 95%, 96%, 97%, 98% or 99%.

[0102] Polynucleotide and polypeptide sequences, variants thereof, and the structural relationships of these sequences can be described by the terms “homology”, “homologous”, “substantially identical”, “substantially similar” and “corresponding substantially” which are used interchangeably herein. These refer to polypeptide or nucleic acid sequences wherein changes in one or more amino acids or nucleotide bases do not affect the function of the molecule, such as the ability to mediate gene expression or to produce a certain phenotype. These terms also refer to modification(s) of nucleic acid sequences that do not substantially alter the functional properties of the resulting nucleic acid relative to the initial, unmodified nucleic acid. These modifications include deletion, substitution, and/or insertion of one or more nucleotides in the nucleic acid fragment, or the association of an atom or a molecule to an existing nucleotide in a polynucleotide (for example but not limited to: a covalent addition of a methyl group, or an ionic interaction with a metal ion). Substantially similar nucleic acid sequences encompassed may be defined by their ability to hybridize (under moderately stringent conditions, e.g., 0.5×SSC, 0.1% SDS, 60° C.) with the sequences exemplified herein, or to any portion of the nucleotide sequences disclosed herein and which are functionally equivalent to any of the nucleic acid sequences disclosed herein. Stringency conditions can be adjusted to screen for moderately similar fragments, such as homologous sequences from distantly related organisms, to highly similar fragments, such as genes that duplicate functional enzymes from closely related organisms. Post-hybridization washes determine stringency conditions.

[0103] A “centimorgan” (cM) or “map unit” is the distance between two polynucleotide sequences, linked genes, markers, target sites, loci, or any pair thereof, wherein 1% of the products of meiosis are recombinant. Thus, a centimorgan is equivalent to a distance equal to a 1% average recombination frequency between the two linked genes, markers, target sites, loci, or any pair thereof.

[0104] An “isolated” or “purified” nucleic acid molecule, polynucleotide, polypeptide, or protein, or biologically active portion thereof, is substantially or essentially free from components that normally accompany or interact with the polynucleotide or protein as found in its naturally occurring environment. Thus, an isolated or purified polynucleotide or polypeptide or protein is substantially free of other cellular material, or culture medium when produced by recombinant techniques, or substantially free of chemical precursors or other chemicals when chemically synthesized. Optimally, an “isolated” polynucleotide is free of sequences (optimally protein encoding sequences) that naturally flank the polynucleotide (i.e., sequences located at the 5′ and 3′ ends of the polynucleotide) in the genomic DNA of the organism from which the polynucleotide is derived. For example, in various embodiments, the isolated polynucleotide can contain less than about 5 kb, 4 kb, 3 kb, 2 kb, 1 kb, 0.5 kb, or 0.1 kb of nucleotide sequence that naturally flank the polynucleotide in genomic DNA of the cell from which the polynucleotide is derived. Isolated polynucleotides may be purified from a cell in which they naturally occur. Conventional nucleic acid purification methods known to skilled artisans may be used to obtain isolated polynucleotides. The term also embraces recombinant polynucleotides and chemically synthesized polynucleotides.

[0105] The term “fragment” refers to a contiguous set of polynucleotides or polypeptides. In one embodiment, a fragment is 2, 3, 4, 5, 6, 7 8, 9, 10, 11, 12, 13, 14, 15, 16, 17, 18, 19, 20, or greater than 20 contiguous polynucleotides. In one embodiment, a fragment is 2, 3, 4, 5, 6, 7 8, 9, 10, 11, 12, 13, 14, 15, 16, 17, 18, 19, 20, or greater than 20 contiguous polypeptides. A fragment may or may not exhibit the function of a sequence sharing some percent identity over the length of said fragment.

[0106] The terms “fragment that is functionally equivalent” and “functionally equivalent fragment” are used interchangeably herein. These terms refer to a portion or subsequence of an isolated nucleic acid fragment or polypeptide that displays the same activity or function as the longer sequence from which it derives. In one example, the fragment retains the ability to alter gene expression or produce a certain phenotype whether or not the fragment encodes an active protein. For example, the fragment can be used in the design of genes to produce the desired phenotype in a modified plant. Genes can be designed for use in suppression by linking a nucleic acid fragment, whether or not it encodes an active enzyme, in the sense or antisense orientation relative to a promoter sequence.

[0107] “Gene” includes a nucleic acid fragment that expresses a functional molecule such as, but not limited to, a specific protein, including regulatory sequences preceding (5′ non-coding sequences) and following (3′ non-coding sequences) the coding sequence. “Native gene” refers to a gene as found in its natural endogenous location with its own regulatory sequences.

[0108] By the term “endogenous” it is meant a sequence or other molecule that naturally occurs in a cell or organism. In one aspect, an endogenous polynucleotide is normally found in the genome of the cell from which it is obtained; that is, not heterologous.

[0109] An “allele” is one of several alternative forms of a gene occupying a given locus on a chromosome. When all the alleles present at a given locus on a chromosome are the same, that plant is homozygous at that locus. If the alleles present at a given locus on a chromosome differ, that plant is heterozygous at that locus.

[0110] “Coding sequence” refers to a polynucleotide sequence that may be transcribed into an RNA molecule and optionally further translated into a polypeptide. “Regulatory sequences” refer to nucleotide sequences located upstream (5′ non-coding sequences), within, or downstream (3′ non-coding sequences) of a coding sequence, and which influence the transcription, RNA processing or stability, or translation of the associated coding sequence. Regulatory sequences include, but are not limited to, promoters, translation leader sequences, 5′ untranslated sequences, 3′ untranslated sequences, introns, polyadenylation target sequences, RNA processing sites, effector binding sites, and stem-loop structures.

[0111] A “mutated gene” is a gene that has been altered through human intervention. Such a “mutated gene” has a sequence that differs from the sequence of the corresponding non-mutated gene by at least one nucleotide addition, deletion, or substitution. In certain embodiments of the disclosure, the mutated gene comprises an alteration that results from a guide polynucleotide/Cas endonuclease system as disclosed herein. A mutated plant is a plant comprising a mutated gene.

[0112] As used herein, a “targeted mutation” is a mutation in a gene (referred to as the target gene), including a native gene, that was made by altering a target sequence within the target gene using any method known to one skilled in the art, including a method involving a guided Cas endonuclease system as disclosed herein.

[0113] The terms “knock-out”, “gene knock-out” and “genetic knock-out” are used interchangeably herein. A knock-out represents a DNA sequence of a cell that has been rendered partially or completely inoperative by targeting with a Cas protein; for example, a DNA sequence prior to knock-out could have encoded an amino acid sequence, or could have had a regulatory function (e.g., promoter).

[0114] The terms “knock-in”, “gene knock-in, “gene insertion” and “genetic knock-in” are used interchangeably herein. A knock-in represents the replacement or insertion of a DNA sequence at a specific DNA sequence in cell by targeting with a Cas protein (for example by homologous recombination (HR), wherein a suitable donor DNA polynucleotide is also used). Examples of knock-ins are a specific insertion of a heterologous amino acid coding sequence in a coding region of a gene, or a specific insertion of a transcriptional regulatory element in a genetic locus.

[0115] By “domain” it is meant a contiguous stretch of nucleotides (that can be RNA, DNA, and/or RNA-DNA-combination sequence) or amino acids.

[0116] The term “conserved domain” or “motif” means a set of polynucleotides or amino acids conserved at specific positions along an aligned sequence of evolutionarily related proteins. While amino acids at other positions can vary between homologous proteins, amino acids that are highly conserved at specific positions indicate amino acids that are essential to the structure, the stability, or the activity of a protein. Because they are identified by their high degree of conservation in aligned sequences of a family of protein homologues, they can be used as identifiers, or “signatures”, to determine if a protein with a newly determined sequence belongs to a previously identified protein family.

[0117] A “codon-modified gene” or “codon-preferred gene” or “codon-optimized gene” is a gene having its frequency of codon usage designed to mimic the frequency of preferred codon usage of the host cell.

[0118] An “optimized” polynucleotide is a sequence that has been optimized for improved expression or function in a particular heterologous host cell.

[0119] A “plant-optimized nucleotide sequence” is a nucleotide sequence that has been optimized for expression or function in plants, particularly for increased expression in plants. A plant-optimized nucleotide sequence includes a codon-optimized gene. A plant-optimized nucleotide sequence can be synthesized by modifying a nucleotide sequence encoding a protein such as, for example, a Cas endonuclease as disclosed herein, using one or more plant-preferred codons for improved expression. See, for example, Campbell and Gowri (1990) Plant Physiol. 92:1-11 for a discussion of host-preferred codon usage.

[0120] A “promoter” is a region of DNA involved in recognition and binding of RNA polymerase and other proteins to initiate transcription. The promoter sequence consists of proximal and more distal upstream elements, the latter elements often referred to as enhancers. An “enhancer” is a DNA sequence that can stimulate promoter activity, and may be an innate element of the promoter or a heterologous element inserted to enhance the level or tissue-specificity of a promoter. Promoters may be derived in their entirety from a native gene, or be composed of different elements derived from different promoters found in nature, and/or comprise synthetic DNA segments. It is understood by those skilled in the art that different promoters may direct the expression of a gene in different tissues or cell types, or at different stages of development, or in response to different environmental conditions. It is further recognized that since in most cases the exact boundaries of regulatory sequences have not been completely defined, DNA fragments of some variation may have identical promoter activity.

[0121] Promoters that cause a gene to be expressed in most cell types at most times are commonly referred to as “constitutive promoters”. The term “inducible promoter” refers to a promoter that selectively express a coding sequence or functional RNA in response to the presence of an endogenous or exogenous stimulus, for example by chemical compounds (chemical inducers) or in response to environmental, hormonal, chemical, and/or developmental signals. Inducible or regulated promoters include, for example, promoters induced or regulated by light, heat, stress, flooding or drought, salt stress, osmotic stress, phytohormones, wounding, or chemicals such as ethanol, abscisic acid (ABA), jasmonate, salicylic acid, or safeners.

[0122] “Translation leader sequence” refers to a polynucleotide sequence located between the promoter sequence of a gene and the coding sequence. The translation leader sequence is present in the mRNA upstream of the translation start sequence. The translation leader sequence may affect processing of the primary transcript to mRNA, mRNA stability or translation efficiency. Examples of translation leader sequences have been described (e.g., Turner and Foster, (1995) Mol Biotechnol 3:225-236).

[0123] “3′ non-coding sequences”, “transcription terminator” or “termination sequences” refer to DNA sequences located downstream of a coding sequence and include polyadenylation recognition sequences and other sequences encoding regulatory signals capable of affecting mRNA processing or gene expression. The polyadenylation signal is usually characterized by affecting the addition of polyadenylic acid tracts to the 3′ end of the mRNA precursor. The use of different 3′ non-coding sequences is exemplified by Ingelbrecht et al., (1989) Plant Cell 1:671-680.

[0124] “RNA transcript” refers to the product resulting from RNA polymerase-catalyzed transcription of a DNA sequence. When the RNA transcript is a perfect complimentary copy of the DNA sequence, it is referred to as the primary transcript or pre-mRNA. A RNA transcript is referred to as the mature RNA or mRNA when it is a RNA sequence derived from post-transcriptional processing of the primary transcript pre-mRNA. “Messenger RNA” or “mRNA” refers to the RNA that is without introns and that can be translated into protein by the cell. “cDNA” refers to a DNA that is complementary to, and synthesized from, an mRNA template using the enzyme reverse transcriptase. The cDNA can be single-stranded or converted into double-stranded form using the Klenow fragment of DNA polymerase I. “Sense” RNA refers to RNA transcript that includes the mRNA and can be translated into protein within a cell or in vitro. “Antisense RNA” refers to an RNA transcript that is complementary to all or part of a target primary transcript or mRNA, and that blocks the expression of a target gene (see, e.g., U.S. Pat. No. 5,107,065). The complementarity of an antisense RNA may be with any part of the specific gene transcript, i.e., at the 5′ non-coding sequence, 3′ non-coding sequence, introns, or the coding sequence. “Functional RNA” refers to antisense RNA, ribozyme RNA, or other RNA that may not be translated yet has an effect on cellular processes. The terms “complement” and “reverse complement” are used interchangeably herein with respect to mRNA transcripts, and are meant to define the antisense RNA of the message.

[0125] The term “genome” refers to the entire complement of genetic material (genes and non-coding sequences) that is present in each cell of an organism, or virus or organelle; and/or a complete set of chromosomes inherited as a (haploid) unit from one parent.

[0126] The term “operably linked” refers to the association of nucleic acid sequences on a single nucleic acid fragment so that the function of one is regulated by the other. For example, a promoter is operably linked with a coding sequence when it is capable of regulating the expression of that coding sequence (i.e., the coding sequence is under the transcriptional control of the promoter). Coding sequences can be operably linked to regulatory sequences in a sense or antisense orientation. In another example, the complementary RNA regions can be operably linked, either directly or indirectly, 5′ to the target mRNA, or 3′ to the target mRNA, or within the target mRNA, or a first complementary region is 5′ and its complement is 3′ to the target mRNA.

[0127] Generally, “host” refers to an organism or cell into which a heterologous component (polynucleotide, polypeptide, other molecule, cell) has been introduced. As used herein, a “host cell” refers to an in vivo or in vitro eukaryotic cell, prokaryotic cell (e.g., bacterial or archaeal cell), or cell from a multicellular organism (e.g., a cell line) cultured as a unicellular entity, into which a heterologous polynucleotide or polypeptide has been introduced. In some embodiments, the cell is selected from the group consisting of: an archaeal cell, a bacterial cell, a eukaryotic cell, a eukaryotic single-cell organism, a somatic cell, a germ cell, a stem cell, a plant cell, an algal cell, an animal cell, in invertebrate cell, a vertebrate cell, a fish cell, a frog cell, a bird cell, an insect cell, a mammalian cell, a pig cell, a cow cell, a goat cell, a sheep cell, a rodent cell, a rat cell, a mouse cell, a non-human primate cell, and a human cell. In some cases, the cell is in vitro. In some cases, the cell is in vivo.

[0128] The term “recombinant” refers to an artificial combination of two otherwise separated segments of sequence, e.g., by chemical synthesis, or manipulation of isolated segments of nucleic acids by genetic engineering techniques.

[0129] The terms “plasmid”, “vector” and “cassette” refer to a linear or circular extra chromosomal element often carrying genes that are not part of the central metabolism of the cell, and usually in the form of double-stranded DNA. Such elements may be autonomously replicating sequences, genome integrating sequences, phage, or nucleotide sequences, in linear or circular form, of a single- or double-stranded DNA or RNA, derived from any source, in which a number of nucleotide sequences have been joined or recombined into a unique construction which is capable of introducing a polynucleotide of interest into a cell. “Transformation cassette” refers to a specific vector comprising a gene and having elements in addition to the gene that facilitates transformation of a particular host cell. “Expression cassette” refers to a specific vector comprising a gene and having elements in addition to the gene that allow for expression of that gene in a host.

[0130] The terms “recombinant DNA molecule”, “recombinant DNA construct”, “expression construct”, “construct”, and “recombinant construct” are used interchangeably herein. A recombinant DNA construct comprises an artificial combination of nucleic acid sequences, e.g., regulatory and coding sequences that are not all found together in nature. For example, a recombinant DNA construct may comprise regulatory sequences and coding sequences that are derived from different sources, or regulatory sequences and coding sequences derived from the same source, but arranged in a manner different than that found in nature. Such a construct may be used by itself or may be used in conjunction with a vector. If a vector is used, then the choice of vector is dependent upon the method that will be used to introduce the vector into the host cells as is well known to those skilled in the art. For example, a plasmid vector can be used. The skilled artisan is well aware of the genetic elements that must be present on the vector in order to successfully transform, select and propagate host cells. The skilled artisan will also recognize that different independent transformation events may result in different levels and patterns of expression (Jones et al., (1985) EMBO J 4:2411-2418; De Almeida et al., (1989) Mol Gen Genetics 218:78-86), and thus that multiple events are typically screened in order to obtain lines displaying the desired expression level and pattern. Such screening may be accomplished standard molecular biological, biochemical, and other assays including Southern analysis of DNA, Northern analysis of mRNA expression, PCR, real time quantitative PCR (qPCR), reverse transcription PCR (RT-PCR), immunoblotting analysis of protein expression, enzyme or activity assays, and/or phenotypic analysis.

[0131] The term “heterologous” refers to the difference between the original environment, location, or composition of a particular polynucleotide or polypeptide sequence and its current environment, location, or composition. Non-limiting examples include differences in taxonomic derivation (e.g., a polynucleotide sequence obtained from Zea mays would be heterologous if inserted into the genome of an Oryza sativa plant, or of a different variety or cultivar of Zea mays; or a polynucleotide obtained from a bacterium was introduced into a cell of a plant), or sequence (e.g., a polynucleotide sequence obtained from Zea mays, isolated, modified, and re-introduced into a maize plant). As used herein, “heterologous” in reference to a sequence can refer to a sequence that originates from a different species, variety, foreign species, or, if from the same species, is substantially modified from its native form in composition and/or genomic locus by deliberate human intervention. For example, a promoter operably linked to a heterologous polynucleotide is from a species different from the species from which the polynucleotide was derived, or, if from the same/analogous species, one or both are substantially modified from their original form and/or genomic locus, or the promoter is not the native promoter for the operably linked polynucleotide. Alternatively, one or more regulatory region(s) and/or a polynucleotide provided herein may be entirely synthetic.

[0132] The term “expression”, as used herein, refers to the production of a functional end-product (e.g., an mRNA, guide RNA, or a protein) in either precursor or mature form.

[0133] A “mature” protein refers to a post-translationally processed polypeptide (i.e., one from which any pre- or propeptides present in the primary translation product have been removed).

[0134] “Precursor” protein refers to the primary product of translation of mRNA (i.e., with pre- and propeptides still present). Pre- and propeptides may be but are not limited to intracellular localization signals.

[0135] “CRISPR” (Clustered Regularly Interspaced Short Palindromic Repeats) loci refers to certain genetic loci encoding components of DNA cleavage systems, for example, used by bacterial and archaeal cells to destroy foreign DNA (Horvath and Barrangou, 2010, Science 327:167-170; WO2007025097, published 1 Mar. 2007). A CRISPR locus can consist of a CRISPR array, comprising short direct repeats (CRISPR repeats) separated by short variable DNA sequences (called spacers), which can be flanked by diverse Cas (CRISPR-associated) genes.

[0136] As used herein, an “effector” or “effector protein” is a protein that encompasses an activity including recognizing, binding to, and/or cleaving or nicking a polynucleotide target. The “effector complex” of a CRISPR system includes Cas proteins involved in crRNA and target recognition and binding. Some of the component Cas proteins may additionally comprise domains involved in target polynucleotide cleavage.

[0137] The term “Cas protein” refers to a polypeptide encoded by a Cas (CRISPR-associated) gene. A Cas protein includes but is not limited to: the novel Cas9 orthologs disclosed herein, a Cas9 protein, a Cpf1 (Cas12) protein, a C2c1 protein, a C2c2 protein, a C2c3 protein, Cas3, Cas3-HD, Cas 5, Cas7, Cas8, Cas10, or combinations or complexes of these. A Cas protein may be a “Cas endonuclease”, that when in complex with a suitable polynucleotide component, is capable of recognizing, binding to, and optionally nicking or cleaving all or part of a specific polynucleotide target sequence. A Cas endonuclease described herein comprises one or more nuclease domains. A Cas protein is further defined as a functional fragment or functional variant of a native Cas protein, or a protein that shares at least 50%, between 50% and 55%, at least 55%, between 55% and 60%, at least 60%, between 60% and 65%, at least 65%, between 65% and 70%, at least 70%, between 70% and 75%, at least 75%, between 75% and 80%, at least 80%, between 80% and 85%, at least 85%, between 85% and 90%, at least 90%, between 90% and 95%, at least 95%, between 95% and 96%, at least 96%, between 96% and 97%, at least 97%, between 97% and 98%, at least 98%, between 98% and 99%, at least 99%, between 99% and 100%, or 100% sequence identity with at least 50, between 50 and 100, at least 100, between 100 and 150, at least 150, between 150 and 200, at least 200, between 200 and 250, at least 250, between 250 and 300, at least 300, between 300 and 350, at least 350, between 350 and 400, at least 400, between 400 and 450, at least 500, or greater than 500 contiguous amino acids of a native Cas protein, and retains at least partial activity.

[0138] A “functional fragment”, “fragment that is functionally equivalent” and “functionally equivalent fragment” of a Cas endonuclease are used interchangeably herein, and refer to a portion or subsequence of the Cas endonuclease of the present disclosure in which the ability to recognize, bind to, and optionally unwind, nick or cleave (introduce a single or double-strand break in) the target site is retained. The portion or subsequence of the Cas endonuclease can comprise a complete or partial (functional) peptide of any one of its domains such as for example, but not limiting to a complete or functional part of a HD domain, a complete or functional part of a helicase domain, a complete or functional part of an endonuclease domain, a complete or functional part of a PAM-interacting domain, a complete or functional part of a Wedge domain, a complete or functional part of an RuvC domain, a complete or functional part of a zinc-finger domain, or a complete or functional part of a Cas protein (such as but not limiting to a Cas9, Cpf1, Cas5, Cas5d, Cas7, Cas8b1, Cas1, Cas2, Cas4, or Cas9 ortholog).

[0139] The terms “functional variant”, “variant that is functionally equivalent” and “functionally equivalent variant” of a Cas endonuclease or Cas endonuclease, including Cas9 ortholog described herein, are used interchangeably herein, and refer to a variant of the Cas endonuclease disclosed herein in which the ability to recognize, bind to, and optionally unwind, nick or cleave all or part of a target sequence is retained.

[0140] In some aspects, a functional fragment or functional variant retains about the same level and type (e.g., target polynucleotide recognition, binding, and cleavage) of activity as the parental molecule from which it was derived. In some aspects, a functional fragment or functional variant displays improved activity of the same type (e.g., increased specificity of target polynucleotide recognition) as the parental molecule from which it was derived. In some aspects, a functional fragment or functional variant displays reduced activity of the same type (e.g., lower target polynucleotide binding affinity) as the parental molecule from which it was derived. In some aspects, a functional fragment or functional variant displays partial activity (e.g. polynucleotide recognition and binding, but not cleavage) as the parental molecule from which it was derived. In some aspects, a functional fragment or functional variant displays a different type of activity (e.g., creation of a single-strand nick on a target polynucleotide vs. a double strand break) than the parental molecule from which it was derived. Any similarity or difference in type or level of activity may be chosen as a desired outcome, according to the needs of the practitioner.

[0141] A Cas endonuclease may also include a multifunctional Cas endonuclease. The term “multifunctional Cas endonuclease” and “multifunctional Cas endonuclease polypeptide” are used interchangeably herein and includes reference to a single polypeptide that has Cas endonuclease functionality (comprising at least one protein domain that can act as a Cas endonuclease) and at least one other functionality, such as but not limited to, the functionality to form a cascade (comprises at least a second protein domain that can form a cascade with other proteins). In one aspect, the multifunctional Cas endonuclease comprises at least one additional protein domain relative (either internally, upstream (5′), downstream (3′), or both internally 5′ and 3′, or any combination thereof) to those domains typical of a Cas endonuclease.

[0142] The terms “cascade” and “cascade complex” are used interchangeably herein and include reference to a multi-subunit protein complex that can assemble with a polynucleotide forming a polynucleotide-protein complex (PNP). Cascade is a PNP that relies on the polynucleotide for complex assembly and stability, and for the identification of target nucleic acid sequences. Cascade functions as a surveillance complex that finds and optionally binds target nucleic acids that are complementary to a variable targeting domain of the guide polynucleotide.

[0143] The terms “cleavage-ready Cascade”, “crCascade”, “cleavage-ready Cascade complex”, “crCascade complex”, “cleavage-ready Cascade system”, “CRC” and “crCascade system”, are used interchangeably herein and include reference to a multi-subunit protein complex that can assemble with a polynucleotide forming a polynucleotide-protein complex (PNP), wherein one of the cascade proteins is a Cas endonuclease capable of recognizing, binding to, and optionally unwinding, nicking, or cleaving all or part of a target sequence.

[0144] The terms “5′-cap” and “7-methylguanylate (m7G) cap” are used interchangeably herein. A 7-methylguanylate residue is located on the 5′ terminus of messenger RNA (mRNA) in eukaryotes. RNA polymerase II (Pol II) transcribes mRNA in eukaryotes. Messenger RNA capping occurs generally as follows: The most terminal 5′ phosphate group of the mRNA transcript is removed by RNA terminal phosphatase, leaving two terminal phosphates. A guanosine monophosphate (GMP) is added to the terminal phosphate of the transcript by a guanylyl transferase, leaving a 5′-5′ triphosphate-linked guanine at the transcript terminus. Finally, the 7-nitrogen of this terminal guanine is methylated by a methyl transferase.

[0145] The terminology “not having a 5′-cap” herein is used to refer to RNA having, for example, a 5′-hydroxyl group instead of a 5′-cap. Such RNA can be referred to as “uncapped RNA”, for example. Uncapped RNA can better accumulate in the nucleus following transcription, since 5′-capped RNA is subject to nuclear export. One or more RNA components herein are uncapped.

[0146] As used herein, the term “guide polynucleotide”, relates to a polynucleotide sequence that can form a complex with a Cas endonuclease, including the Cas endonuclease described herein, and enables the Cas endonuclease to recognize, optionally bind to, and optionally cleave a DNA target site. The guide polynucleotide sequence can be a RNA sequence, a DNA sequence, or a combination thereof (a RNA-DNA combination sequence).

[0147] The terms “functional fragment”, “fragment that is functionally equivalent” and “functionally equivalent fragment” of a guide RNA, crRNA or tracrRNA are used interchangeably herein, and refer to a portion or subsequence of the guide RNA, crRNA or tracrRNA, respectively, of the present disclosure in which the ability to function as a guide RNA, crRNA or tracrRNA, respectively, is retained.

[0148] The terms “functional variant”, “variant that is functionally equivalent” and “functionally equivalent variant” of a guide RNA, crRNA or tracrRNA (respectively) are used interchangeably herein, and refer to a variant of the guide RNA, crRNA or tracrRNA, respectively, of the present disclosure in which the ability to function as a guide RNA, crRNA or tracrRNA, respectively, is retained.

[0149] The terms “single guide RNA” and “sgRNA” are used interchangeably herein and relate to a synthetic fusion of two RNA molecules, a crRNA (CRISPR RNA) comprising a variable targeting domain (linked to a tracr mate sequence that hybridizes to a tracrRNA), fused to a tracrRNA (trans-activating CRISPR RNA). The single guide RNA can comprise a crRNA or crRNA fragment and a tracrRNA or tracrRNA fragment of the type II CRISPR/Cas system that can form a complex with a type II Cas endonuclease, wherein said guide RNA/Cas endonuclease complex can direct the Cas endonuclease to a DNA target site, enabling the Cas endonuclease to recognize, optionally bind to, and optionally nick or cleave (introduce a single or double-strand break) the DNA target site.

[0150] The term “variable targeting domain” or “VT domain” is used interchangeably herein and includes a nucleotide sequence that can hybridize (is complementary) to one strand (nucleotide sequence) of a double strand DNA target site. The percent complementation between the first nucleotide sequence domain (VT domain) and the target sequence can be at least 50%, 51%, 52%, 53%, 54%, 55%, 56%, 57%, 58%, 59%, 60%, 61%, 62%, 63%, 63%, 65%, 66%, 67%, 68%, 69%, 70%, 71%, 72%, 73%, 74%, 75%, 76%, 77%, 78%, 79%, 80%, 81%, 82%, 83%, 84%, 85%, 86%, 87%, 88%, 89%, 90%, 91%, 92%, 93%, 94%, 95%, 96%, 97%, 98%, 99% or 100%. The variable targeting domain can be at least 12, 13, 14, 15, 16, 17, 18, 19, 20, 21, 22, 23, 24, 25, 26, 27, 28, 29 or 30 nucleotides in length. In some embodiments, the variable targeting domain comprises a contiguous stretch of 12 to 30 nucleotides. The variable targeting domain can be composed of a DNA sequence, a RNA sequence, a modified DNA sequence, a modified RNA sequence, or any combination thereof.

[0151] The term “Cas endonuclease recognition domain” or “CER domain” (of a guide polynucleotide) is used interchangeably herein and includes a nucleotide sequence that interacts with a Cas endonuclease polypeptide. A CER domain comprises a (trans-acting) tracrNucleotide mate sequence followed by a tracrNucleotide sequence. The CER domain can be composed of a DNA sequence, a RNA sequence, a modified DNA sequence, a modified RNA sequence (see for example US20150059010A1, published 26 Feb. 2015), or any combination thereof.

[0152] As used herein, the terms “guide polynucleotide/Cas endonuclease complex”, “guide polynucleotide/Cas endonuclease system”, “guide polynucleotide/Cas complex”, “guide polynucleotide/Cas system” and “guided Cas system” “polynucleotide-guided endonuclease”, and “PGEN” are used interchangeably herein and refer to at least one guide polynucleotide and at least one Cas endonuclease, that are capable of forming a complex, wherein said guide polynucleotide/Cas endonuclease complex can direct the Cas endonuclease to a DNA target site, enabling the Cas endonuclease to recognize, bind to, and optionally nick or cleave (introduce a single or double-strand break) the DNA target site. A guide polynucleotide/Cas endonuclease complex herein can comprise Cas protein(s) and suitable polynucleotide component(s) of any of the known CRISPR systems (Horvath and Barrangou, 2010, Science 327:167-170; Makarova et al. 2015, Nature Reviews Microbiology Vol. 13:1-15; Zetsche et al., 2015, Cell 163, 1-13; Shmakov et al., 2015, Molecular Cell 60, 1-13).

[0153] The terms “guide RNA/Cas endonuclease complex”, “guide RNA/Cas endonuclease system”, “guide RNA/Cas complex”, “guide RNA/Cas system”, “gRNA/Cas complex”, “gRNA/Cas system”, “RNA-guided endonuclease”, and “RGEN” are used interchangeably herein and refer to at least one RNA component and at least one Cas endonuclease that are capable of forming a complex, wherein said guide RNA/Cas endonuclease complex can direct the Cas endonuclease to a DNA target site, enabling the Cas endonuclease to recognize, bind to, and optionally nick or cleave (introduce a single or double-strand break) the DNA target site. In some aspects, the components are provided as a ribonucleoprotein complex (“RNP”) of a Cas endonuclease protein and a guide RNA.

[0154] The terms “target site”, “target sequence”, “target site sequence, “target DNA”, “target locus”, “genomic target site”, “genomic target sequence”, “genomic target locus” and “protospacer”, are used interchangeably herein and refer to a polynucleotide sequence such as, but not limited to, a nucleotide sequence on a chromosome, episome, a locus, or any other DNA molecule in the genome (including chromosomal, chloroplastic, mitochondrial DNA, plasmid DNA) of a cell, at which a guide polynucleotide/Cas endonuclease complex can recognize, bind to, and optionally nick or cleave. The target site can be an endogenous site in the genome of a cell, or alternatively, the target site can be heterologous to the cell and thereby not be naturally occurring in the genome of the cell, or the target site can be found in a heterologous genomic location compared to where it occurs in nature. As used herein, terms “endogenous target sequence” and “native target sequence” are used interchangeable herein to refer to a target sequence that is endogenous or native to the genome of a cell and is at the endogenous or native position of that target sequence in the genome of the cell. An “artificial target site” or “artificial target sequence” are used interchangeably herein and refer to a target sequence that has been introduced into the genome of a cell. Such an artificial target sequence can be identical in sequence to an endogenous or native target sequence in the genome of a cell but be located in a different position (i.e., a non-endogenous or non-native position) in the genome of a cell.

[0155] A “protospacer adjacent motif” (PAM) herein refers to a short nucleotide sequence adjacent to a target sequence (protospacer) that is recognized (targeted) by a guide polynucleotide/Cas endonuclease system described herein. In some aspects, the Cas endonuclease may not successfully recognize a target DNA sequence if the target DNA sequence is not adjacent to, or near, a PAM sequence. In some aspects, the PAM precedes the target sequence (e.g. Cas12a). In some aspects, the PAM follows the target sequence (e.g. S. pyogenes Cas9). The sequence and length of a PAM herein can differ depending on the Cas protein or Cas protein complex used. The PAM sequence can be of any length but is typically 1, 2, 3, 4, 5, 6, 7, 8, 9, 10, 11, 12, 13, 14, 15, 16, 17, 18, 19 or 20 nucleotides long.

[0156] An “altered target site”, “altered target sequence”, “modified target site”, “modified target sequence” are used interchangeably herein and refer to a target sequence as disclosed herein that comprises at least one alteration when compared to non-altered target sequence. Such “alterations” include, for example: (i) replacement of at least one nucleotide, (ii) a deletion of at least one nucleotide, (iii) an insertion of at least one nucleotide, or (iv) any combination of (i)-(iii).

[0157] A “modified nucleotide” or “edited nucleotide” refers to a nucleotide sequence of interest that comprises at least one alteration when compared to its non-modified nucleotide sequence. Such “alterations” include, for example: (i) replacement of at least one nucleotide, (ii) a deletion of at least one nucleotide, (iii) an insertion of at least one nucleotide, or (iv) any combination of (i)-(iii).

[0158] Methods for “modifying a target site” and “altering a target site” are used interchangeably herein and refer to methods for producing an altered target site.

[0159] As used herein, “donor DNA” is a DNA construct that comprises a polynucleotide of interest to be inserted into the target site of a Cas endonuclease.

[0160] The term “polynucleotide modification template” includes a polynucleotide that comprises at least one nucleotide modification when compared to the nucleotide sequence to be edited. A nucleotide modification can be at least one nucleotide substitution, addition or deletion. Optionally, the polynucleotide modification template can further comprise homologous nucleotide sequences flanking the at least one nucleotide modification, wherein the flanking homologous nucleotide sequences provide sufficient homology to the desired nucleotide sequence to be edited.

[0161] The term “plant-optimized Cas endonuclease” herein refers to a Cas protein, including a multifunctional Cas protein, encoded by a nucleotide sequence that has been optimized for expression in a plant cell or plant.

[0162] A “plant-optimized nucleotide sequence encoding a Cas endonuclease”, “plant-optimized construct encoding a Cas endonuclease” and a “plant-optimized polynucleotide encoding a Cas endonuclease” are used interchangeably herein and refer to a nucleotide sequence encoding a Cas protein, or a variant or functional fragment thereof, that has been optimized for expression in a plant cell or plant.

[0163] The term “plant” generically includes whole plants, plant organs, plant tissues, seeds, plant cells, seeds and progeny of the same. Plant cells include, without limitation, cells from seeds, suspension cultures, embryos, meristematic regions, callus tissue, leaves, roots, shoots, gametophytes, sporophytes, pollen and microspores. A “plant element” is intended to reference either a whole plant or a plant component, which may comprise differentiated and/or undifferentiated tissues, for example but not limited to plant tissues, parts, and cell types. In one embodiment, a plant element is one of the following: whole plant, seedling, meristematic tissue, ground tissue, vascular tissue, dermal tissue, seed, leaf, root, shoot, stem, flower, fruit, stolon, bulb, tuber, corm, keiki, shoot, bud, tumor tissue, and various forms of cells and culture (e.g., single cells, protoplasts, embryos, callus tissue). The term “plant organ” refers to plant tissue or a group of tissues that constitute a morphologically and functionally distinct part of a plant. As used herein, a “plant element” is synonymous to a “portion” of a plant, and refers to any part of the plant, and can include distinct tissues and/or organs, and may be used interchangeably with the term “tissue” throughout. Similarly, a “plant reproductive element” is intended to generically reference any part of a plant that is able to initiate other plants via either sexual or asexual reproduction of that plant, for example but not limited to: seed, seedling, root, shoot, cutting, scion, graft, stolon, bulb, tuber, corm, keiki, or bud. The plant element may be in plant or in a plant organ, tissue culture, or cell culture.

[0164] “Progeny” comprises any subsequent generation of a plant.

[0165] As used herein, the term “plant part” refers to plant cells, plant protoplasts, plant cell tissue cultures from which plants can be regenerated, plant calli, plant clumps, and plant cells that are intact in plants or parts of plants such as embryos, pollen, ovules, seeds, leaves, flowers, branches, fruit, kernels, ears, cobs, husks, stalks, roots, root tips, anthers, and the like, as well as the parts themselves. Grain is intended to mean the mature seed produced by commercial growers for purposes other than growing or reproducing the species. Progeny, variants, and mutants of the regenerated plants are also included within the scope of the invention, provided that these parts comprise the introduced polynucleotides.

[0166] The term “monocotyledonous” or “monocot” refers to the subclass of angiosperm plants also known as “monocotyledoneae”, whose seeds typically comprise only one embryonic leaf, or cotyledon. The term includes references to whole plants, plant elements, plant organs (e.g., leaves, stems, roots, etc.), seeds, plant cells, and progeny of the same.

[0167] The term “dicotyledonous” or “dicot” refers to the subclass of angiosperm plants also knows as “dicotyledoneae”, whose seeds typically comprise two embryonic leaves, or cotyledons. The term includes references to whole plants, plant elements, plant organs (e.g., leaves, stems, roots, etc.), seeds, plant cells, and progeny of the same.

[0168] As used herein, a “male sterile plant” is a plant that does not produce male gametes that are viable or otherwise capable of fertilization. As used herein, a “female sterile plant” is a plant that does not produce female gametes that are viable or otherwise capable of fertilization. It is recognized that male-sterile and female-sterile plants can be female-fertile and male-fertile, respectively. It is further recognized that a male fertile (but female sterile) plant can produce viable progeny when crossed with a female fertile plant and that a female fertile (but male sterile) plant can produce viable progeny when crossed with a male fertile plant.

[0169] The term “non-conventional yeast” herein refers to any yeast that is not a Saccharomyces (e.g., S. cerevisiae) or Schizosaccharomyces yeast species. (see “Non-Conventional Yeasts in Genetics, Biochemistry and Biotechnology: Practical Protocols”, K. Wolf, K. D. Breunig, G. Barth, Eds., Springer-Verlag, Berlin, Germany, 2003).

[0170] The term “crossed” or “cross” or “crossing” in the context of this disclosure means the fusion of gametes via pollination to produce progeny (i.e., cells, seeds, or plants). The term encompasses both sexual crosses (the pollination of one plant by another) and selfing (self-pollination, i.e., when the pollen and ovule (or microspores and megaspores) are from the same plant or genetically identical plants).

[0171] The term “introgression” refers to the transmission of a desired allele of a genetic locus from one genetic background to another. For example, introgression of a desired allele at a specified locus can be transmitted to at least one progeny plant via a sexual cross between two parent plants, where at least one of the parent plants has the desired allele within its genome. Alternatively, for example, transmission of an allele can occur by recombination between two donor genomes, e.g., in a fused protoplast, where at least one of the donor protoplasts has the desired allele in its genome. The desired allele can be, e.g., a transgene, a modified (mutated or edited) native allele, or a selected allele of a marker or QTL.

[0172] The term “isoline” is a comparative term, and references organisms that are genetically identical, but differ in treatment. In one example, two genetically identical maize plant embryos may be separated into two different groups, one receiving a treatment (such as the introduction of a CRISPR-Cas effector endonuclease) and one control that does not receive such treatment. Any phenotypic differences between the two groups may thus be attributed solely to the treatment and not to any inherency of the plant's endogenous genetic makeup.

[0173] “Introducing” is intended to mean presenting to a target, such as a cell or organism, a polynucleotide or polypeptide or polynucleotide-protein complex, in such a manner that the component(s) gains access to the interior of a cell of the organism or to the cell itself.

[0174] A “polynucleotide of interest” includes any nucleotide sequence encoding a protein or polypeptide that improves desirability of crops. Polynucleotides of interest: include, but are not limited to, polynucleotides encoding important traits for agronomics, herbicide-resistance, insecticidal resistance, disease resistance, nematode resistance, herbicide resistance, microbial resistance, fungal resistance, viral resistance, fertility or sterility, grain characteristics, commercial products, phenotypic marker, or any other trait of agronomic or commercial importance. A polynucleotide of interest may additionally be utilized in either the sense or anti-sense orientation. Further, more than one polynucleotide of interest may be utilized together, or “stacked”, to provide additional benefit.

[0175] A “complex trait locus” includes a genomic locus that has multiple transgenes genetically linked to each other.

[0176] The compositions and methods herein may provide for an improved “agronomic trait” or “trait of agronomic importance” or “trait of agronomic interest” to a plant, which may include, but not be limited to, the following: disease resistance, drought tolerance, heat tolerance, cold tolerance, salinity tolerance, metal tolerance, herbicide tolerance, improved water use efficiency, improved nitrogen utilization, improved nitrogen fixation, pest resistance, herbivore resistance, pathogen resistance, yield improvement, health enhancement, vigor improvement, growth improvement, photosynthetic capability improvement, nutrition enhancement, altered protein content, altered oil content, increased biomass, increased shoot length, increased root length, improved root architecture, modulation of a metabolite, modulation of the proteome, increased seed weight, altered seed carbohydrate composition, altered seed oil composition, altered seed protein composition, altered seed nutrient composition, as compared to an isoline plant not comprising a modification derived from the methods or compositions herein.

[0177] “Agronomic trait potential” is intended to mean a capability of a plant element for exhibiting a phenotype, preferably an improved agronomic trait, at some point during its life cycle, or conveying said phenotype to another plant element with which it is associated in the same plant.

[0178] The terms “decreased,” “fewer,” “slower” and “increased” “faster” “enhanced” “greater” as used herein refers to a decrease or increase in a characteristic of the modified plant element or resulting plant compared to an unmodified plant element or resulting plant. For example, a decrease in a characteristic may be at least 1%, at least 2%, at least 3%, at least 4%, at least 5%, between 5% and 10%, at least 10%, between 10% and 20%, at least 15%, at least 20%, between 20% and 30%, at least 25%, at least 30%, between 30% and 40%, at least 35%, at least 40%, between 40% and 50%, at least 45%, at least 50%, between 50% and 60%, at least 60%, between 60% and 70%, between 70% and 80%, at least 75%, at least 80%, between 80% and 90%, at least 90%, between 90% and 100%, at least 100%, between 100% and 200%, at least 200%, at least 300%, at least 400%) or more lower than the untreated control and an increase may be at least 1%, at least 2%, at least 3%, at least 4%, at least 5%, between 5% and 10%, at least 10%, between 10% and 20%, at least 15%, at least 20%, between 20% and 30%, at least 25%, at least 30%, between 30% and 40%, at least 35%, at least 40%, between 40% and 50%, at least 45%, at least 50%, between 50% and 60%, at least 60%, between 60% and 70%, between 70% and 80%, at least 75%, at least 80%, between 80% and 90%, at least 90%, between 90% and 100%, at least 100%, between 100% and 200%, at least 200%, at least 300%), at least 400% or more higher than the untreated control.

[0179] As used herein, the term “before”, in reference to a sequence position, refers to an occurrence of one sequence upstream, or 5′, to another sequence.

[0180] The meaning of abbreviations is as follows: “sec” means second(s), “min” means minute(s), “h” means hour(s), “d” means day(s), “uL” means microliter(s), “mL” means milliliter(s), “L” means liter(s), “uM” means micromolar, “mM” means millimolar, “M” means molar, “mmol” means millimole(s), “umole” or “umole” mean micromole(s), “g” means gram(s), “ug” or “ug” means microgram(s), “ng” means nanogram(s), “U” means unit(s), “bp” means base pair(s) and “kb” means kilobase(s).

### Classification of CRISPR-Cas Systems

[0181] CRISPR-Cas systems have been classified according to sequence and structural analysis of components. Multiple CRISPR/Cas systems have been described including Class 1 systems, with multisubunit effector complexes (comprising type I, type III, and type IV), and Class 2 systems, with single protein effectors (comprising type II, type V, and type VI) (Makarova et al. 2015, Nature Reviews Microbiology Vol. 13:1-15; Zetsche et al., 2015, Cell 163, 1-13; Shmakov et al., 2015, Molecular Cell 60, 1-13; Haft et al., 2005, Computational Biology, PLOS Comput Biol 1 (6): e60; and Koonin et al. 2017, Curr Opinion Microbiology 37:67-78).

[0182] A CRISPR-Cas system comprises, at a minimum, a CRISPR RNA (crRNA) molecule and at least one CRISPR-associated (Cas) protein to form crRNA ribonucleoprotein (crRNP) effector complexes. CRISPR-Cas loci comprise an array of identical repeats interspersed with DNA-targeting spacers that encode the crRNA components and an operon-like unit of cas genes encoding the Cas protein components. The resulting ribonucleoprotein complex is called a Cascade, that recognizes a polynucleotide in a sequence-specific manner (Jore et al., Nature Structural & Molecular Biology 18, 529-536 (2011)). The crRNA serves as a guide RNA for sequence specific binding of the effector (protein or complex) to double strand DNA sequences, by forming base pairs with the complementary DNA strand while displacing the noncomplementary strand to form a so-called R-loop. (Jore et al., 2011. Nature Structural & Molecular Biology 18, 529-536).

[0183] The Cas endonuclease is guided by a single CRISPR RNA (crRNA) through direct RNA-DNA base-pairing to recognize a DNA target site that is in close vicinity to a protospacer adjacent motif (PAM) (Jore, M. M. et al., 2011, Nat. Struct. Mol. Biol. 18:529-536, Westra, E. R. et al., 2012, Molecular Cell 46:595-605, and Sinkunas, T. et al., 2013, EMBO J. 32:385-394). Class 1 CRISPR-Cas systems comprise Types I, III, and IV. A characteristic feature of Class 1 systems is the presence of an effector endonuclease complex instead of a single protein. Class 2 CRISPR-Cas systems comprise Types II, V, and VI. A characteristic feature of Class 2 systems is the presence of a single Cas protein instead of an effector module endonuclease complex. Types II and V Cas proteins comprise an RuvC-like endonuclease domain that adopts the RNase H fold.

[0184] Class 2 Type II CRISPR/Cas systems employ a crRNA and tracrRNA (trans-activating CRISPR RNA) to guide the Cas endonuclease to its DNA target. The crRNA comprises a spacer region complementary to one strand of the double strand DNA target and a region that base pairs with the tracrRNA (trans-activating CRISPR RNA) forming a RNA duplex that directs the Cas endonuclease to cleave the DNA target. For the S. pyogenes Cas9 endonuclease, the cleavage leaves a blunt end. Type II CRISR-Cas loci can encode a tracrRNA, which is partially complementary to the repeats within the respective CRISPR array, and can comprise other proteins.

Cas endonuclease CRISPR-Cas System Components

### Cas Endonucleases and Effectors

[0185] Endonucleases are enzymes that cleave the phosphodiester bond within a polynucleotide chain. Examples of endonucleases include restriction endonucleases, meganucleases, TAL effector nucleases (TALENs), zinc finger nucleases, and Cas (CRISPR-associated) effector endonucleases.

[0186] Cas endonucleases, either as single effector proteins or in an effector complex with other components, unwind the DNA duplex at the target sequence and optionally cleave at least one DNA strand, as mediated by recognition of the target sequence by a polynucleotide (such as, but not limited to, a crRNA or guide RNA) that is in complex with the Cas endonuclease. Such recognition and cutting of a target sequence by a Cas endonuclease typically occurs if the correct protospacer-adjacent motif (PAM) is located at or adjacent to the 3′ end of the DNA target sequence. Alternatively, a Cas endonuclease herein may lack DNA cleavage or nicking activity, but can still specifically bind to a DNA target sequence when complexed with a suitable RNA component. (See also U.S. Patent Application US20150082478 published 19 Mar. 2015 and US20150059010 published 26 Feb. 2015).

[0187] Cas endonucleases that have been described include, but are not limited to, for example: Cas3 (a feature of Class 1 type I systems), Cas9 (a feature of Class 2 type II systems) and Cas12 (Cpf1) (a feature of Class 2 type V systems).

[0188] Cas9 (formerly referred to as Cas5, Csn1, or Csx12) is a Cas endonuclease that forms a complex with a crNucleotide and a tracrNucleotide, or with a single guide polynucleotide, for specifically recognizing and cleaving all or part of a DNA target sequence. The canonical Cas9 recognizes a 3′ GC-rich PAM sequence on the target dsDNA, typically comprising an NGG motif. The Cas9 orthologs described herein may recognize additional PAM sequences and used to modify target sites with different recognition sequence specificity.

[0189] A Cas9 protein comprises a RuvC nuclease with an HNH (H—N—H) nuclease adjacent to the RuvC-II domain. The RuvC nuclease and HNH nuclease each can cleave a single DNA strand at a target sequence (the concerted action of both domains leads to DNA double-strand cleavage, whereas activity of one domain leads to a nick). In general, the RuvC domain comprises subdomains I, II and III, where domain I is located near the N-terminus of Cas9 and subdomains II and III are located in the middle of the protein, flanking the HNH domain (Hsu et al., 2013, Cell 157:1262-1278). Cas9 endonucleases are typically derived from a type II CRISPR system, which includes a DNA cleavage system utilizing a Cas9 endonuclease in complex with at least one polynucleotide component. For example, a Cas9 can be in complex with a CRISPR RNA (crRNA) and a trans-activating CRISPR RNA (tracrRNA). In another example, a Cas9 can be in complex with a single guide RNA (Makarova et al. 2015, Nature Reviews Microbiology Vol. 13:1-15).

[0190] Cas endonucleases and effector proteins can be used for targeted genome editing (via simplex and multiplex double-strand breaks and nicks) and targeted genome regulation (via tethering of epigenetic effector domains to either the Cas protein or sgRNA. A Cas endonuclease can also be engineered to function as an RNA-guided recombinase, and via RNA tethers could serve as a scaffold for the assembly of multiprotein and nucleic acid complexes (Mali et al., 2013, Nature Methods Vol. 10:957-963).

[0191] The Cas9 orthologs described herein further comprise endonuclease activity.

[0192] A Cas9 ortholog protein is further defined as a functional fragment or functional variant of a native Cas9 ortholog protein, or a protein that shares at least 50%, between 50% and 55%, at least 55%, between 55% and 60%, at least 60%, between 60% and 65%, at least 65%, between 65% and 70%, at least 70%, between 70% and 75%, at least 75%, between 75% and 80%, at least 80%, between 80% and 85%, at least 85%, between 85% and 90%, at least 90%, between 90% and 95%, at least 95%, between 95% and 96%, at least 96%, between 96% and 97%, at least 97%, between 97% and 98%, at least 98%, between 98% and 99%, at least 99%, between 99% and 100%, or 100% sequence identity with at least 50, between 50 and 100, at least 100, between 100 and 150, at least 150, between 150 and 200, at least 200, between 200 and 250, at least 250, between 250 and 300, at least 300, between 300 and 350, at least 350, between 350 and 400, at least 400, between 400 and 450, at least 500, between 500 and 550, at least 550, between 550 and 600, at least 600, between 600 and 650, at least 650, between 650 and 700, at least 700, between 700 and 750, at least 750, between 750 and 800, at least 800, between 800 and 850, at least 850, between 850 and 900, at least 900, between 900 and 950, at least 950, between 950 and 1000, at least 1000, or even than 1000 contiguous amino acids of any of SEQID NO: 86-170 and 511-1135, and retains at least partial activity of the native, full-length Cas9 ortholog protein of any of SEQID NO: 86-170 and 511-1135.

[0193] In some aspects, a Cas9 ortholog may comprises a polypeptide selected from the group consisting of: a polypeptide sharing at least 80%, between 80% and 85%, at least 85%, between 85% and 90%, at least 90%, between 90% and 95%, at least 95%, at least 96%, at least 97%, at least 98%, at least 99%, at least 99.5%, or greater than 99.5% identity with at least 50, between 50 and 100, at least 100, between 100 and 150, at least 150, between 150 and 200, at least 200, between 200 and 250, at least 250, between 250 and 300, at least 300, between 300 and 350, at least 350, between 350 and 400, at least 400, between 400 and 450, at least 500, between 500 and 550, at least 550, between 550 and 600, at least 600, between 600 and 650, at least 650, between 650 and 700, at least 700, between 700 and 750, at least 750, between 750 and 800, at least 800, between 800 and 850, at least 850, between 850 and 900, at least 900, between 900 and 950, at least 950, between 950 and 1000, at least 1000, or even than 1000 contiguous amino acids of any of any of: SEQID NO: 86-171 and 511-1135; a functional variant of any of SEQID NO: 86-171 and 511-1135; a functional fragment of any of SEQID NO: 86-171 and 511-1135; a Cas endonuclease encoded by a polynucleotide selected from the group consisting of: SEQID NO: 1-85; a Cas endonuclease that recognizes a PAM sequence listed in any of Tables 4-83; a Cas endonuclease that recognizes a PAM sequence selected from the group consisting of: NAR (G>A)WH (A>T>C)GN (C>T>R), N (C>D)V (A>S)R (G>A)TTTN (T>V), NV (A>G>C)TTTTT, NATTTTT, NN (H>G)AAAN (G>A>Y)N, N (T>V)NAAATN, NAV (A>G>C)TCNN, NN (A>S>T)NN (W>G>C)CCN (Y>R), NNAH (T>M)ACN, NGTGANN, NARN (A>K>C)ATN, NV (G>A>C)RNTTN, NN (A>B)RN (A>G>T>C)CCN, NN (A>B)NN (T>V)CCH (A>Y), NNN (H>G)NCDAA, NN (H>G)D (A>K)GGDN (A>B), NNNNCCAG, NNNNCTAA, NNNNCVGANN, N (C>D)NNTCCN, NNNNCTA, NNNNCYAA, NAGRGNY, NNGH (W>C)AAA, NNGAAAN, NNAAAAA, NTGAR (G>A)N (A>Y>G)N (Y>R), N (C>D)H (C>W)GH (Y>A)N(A>B)AN(A>T>S), NNAAACN, NNGTAM (A>C)Y, NH (A>Y)ARNN (C>W>G)N, B (C>K)GGN(A>Y>G)N NN, N (T>C>R)AGAN (A>K>C)NN, NGGN (A>T>G>C)NNN, NGGD (A>T>G)TNN, NGGAN(T>A>C>G)NN, CGGWN (T>R>C)NN, NGGWGNN, N (B>A)GGNN (T>V)NN, NNGD (A>T>G)AY (T>C)N, N (T>V)H(T>C>A)AAAAN, NRTAANN, N (H>G)CAAH (Y>A)N (Y>R)N, NATAAN (A>T>S)N, NV (A>G>C)R (A>G)ACCN, CN (C>W>G)AV (A>S)GAC, NNRNCAC, N(A>B)GGD (W>G)D (G>W)NN, BGD (G>W)GTCN(A>K>C), NAANACN, NRTHAN(A>B)N, BHN (H>G)NGN(T>M)H(Y>A), NMRN(A>Y>G)AH(C>T>A)N, NNNCACN, NARN(T>A>S)ACN, NNNNATW, NGCNGCN, NNNCATN, NAGNGCN, NARN(T>M>G)CCN, NATCCTN, NRTAAN(T>A>S)N, N(C>T>G>A)AAD (A>G>T)CNN, NAAAGNN, NNGACNN, N(T>V)NTAAD (A>T>G)N, NNGAD (G>W)NN, NGGN(W>S)NNN, N(T>V)GGD(W>G)GNN, NGGD(A>T>G)N(T>M>G)NN, NNAAAGN, N(G>H)GGDN(T>M>G)NN, NNAGAAA, NN(T>M>G)AAAAA, N(C>D)N(C>W>G)GW(T>C)D(A>G>T)AA, NAAAAYN, NRGNNNN, NATGN(H>G)TN, NNDATTT, and NATARCN(C>T>A>G); a Cas endonuclease that is capable of recognizing a PAM sequence that is one, two, three, four, five, six, seven, eight, nine, or ten nucleotides in length; a Cas endonuclease that comprises a domain at least 80%, between 80% and 85%, at least 85%, between 85% and 90%, at least 90%, between 90% and 95%, at least 95%, at least 96%, at least 97%, at least 98%, at least 99%, at least 99.5%, or greater than 99.5% identity with any of: SEQID NOs: 1136-1730; a Cas endonuclease that has an activity score, according to the identical or similar method of Example 9 or summations of position scores of the amino acid table of Table 86A, of at least 1.0, between 1.0 and 2.0, at least 2.0, between 2.0 and 3.0, at least 3.0, between 3.0 and 4.0, at least 4.0, between 4.0 and 5.0, at least 5.0, between 5.0 and 6.0, at least 6.0, between 6.0 and 7.0, at least 7.0, between 7.0 and 8.0, at least 8.0, between 8.0 and 9.0, at least 9.0, between 9.0 and 10.0, at least 10.0, or even greater than 10.0; a Cas endonuclease comprising one, two, three, four, five, six, seven, eight, nine, ten, eleven, twelve, thirteen, fourteen, fifteen, sixteen, seventeen, eighteen, nineteen, twenty, twenty-one, twenty-two, twenty-three, twenty-four, twenty-five, or twenty-six of the signature amino acids identified in Table 86B, as compared to an alignment with the relative sequence position numbers of SEQID NO: 1125; and a Cas endonuclease that is capable of forming a complex with a guide polynucleotide comprising any one of SEQID NOs: 426-510, 341-425, 141-255, or 256-340. In some aspects, the Cas9 polynucleotide has a plurality of the previously listed features.

[0194] The Cas9 ortholog or cas9 ortholog disclosed herein may further comprise a heterologous component. In some aspects, said heterologous component is selected from the group consisting of: a heterologous polynucleotide, a heterologous polypeptide, a particle, a solid matrix, and a Histidine tag. In some aspects, said heterologous polynucleotide is a guide polynucleotide, or a polynucleotide encoding a marker or purification tag, or a heterologous noncoding regulatory element to which it is operably linked.

[0195] In some aspects, the polynucleotide encoding the Cas9 endonuclease ortholog is comprised within a recombinant vector, that may further comprise additional components, such as but not limited to a heterologous promoter or other non-coding regulatory element.

[0196] A Cas9 ortholog endonuclease, effector protein, or functional fragment thereof, for use in the disclosed methods, can be isolated from a native source, or from a recombinant source where the genetically modified host cell is modified to express the nucleic acid sequence encoding the protein. Alternatively, the Cas9 ortholog protein can be produced using cell free protein expression systems, or be synthetically produced. Cas endonucleases may be isolated and introduced into a heterologous cell, or may be modified from its native form to exhibit a different type or magnitude of activity than what it would exhibit in its native source. Such modifications include but are not limited to: fragments, variants, substitutions, deletions, and insertions.

[0197] Fragments and variants of Cas9 orthologs can be obtained via methods such as site-directed mutagenesis and synthetic construction. Methods for measuring endonuclease activity are well known in the art such as, but not limiting to, WO2013166113 published 7 Nov. 2013, WO2016186953 published 24 Nov. 2016, and WO2016186946 published 24 Nov. 2016.

[0198] The Cas9 ortholog can comprise a modified form of the Cas polypeptide. The modified form of the Cas polypeptide can include an amino acid change (e.g., deletion, insertion, or substitution) that reduces the naturally-occurring nuclease activity of the Cas protein. For example, in some instances, the modified form of the Cas protein has less than 50%, less than 40%, less than 30%, less than 20%, less than 10%, less than 5%, or less than 1% of the nuclease activity of the corresponding wild-type Cas polypeptide (US20140068797 published 6 Mar. 2014). In some cases, the modified form of the Cas polypeptide has no substantial nuclease activity and is referred to as catalytically “inactivated Cas” or “deactivated Cas (dCas).” An inactivated Cas/deactivated Cas includes a deactivated Cas endonuclease (dCas). A catalytically inactive Cas endonuclease can be fused to a heterologous sequence to induce or modify activity.

[0199] A Cas9 ortholog can be part of a fusion protein comprising one or more heterologous protein domains (e.g., 1, 2, 3, or more domains in addition to the Cas protein). Such a fusion protein may comprise any additional protein sequence, and optionally a linker sequence between any two domains, such as between Cas and a first heterologous domain. Examples of protein domains that may be fused to a Cas protein herein include, without limitation, epitope tags (e.g., histidine [His], V5, FLAG, influenza hemagglutinin [HA], myc, VSV-G, thioredoxin [Trx]), reporters (e.g., glutathione-5-transferase [GST], horseradish peroxidase [HRP], chloramphenicol acetyltransferase [CAT], beta-galactosidase, beta-glucuronidase [GUS], luciferase, green fluorescent protein [GFP], HcRed, DsRed, cyan fluorescent protein [CFP], yellow fluorescent protein [YFP], blue fluorescent protein [BFP]), and domains having one or more of the following activities: methylase activity, demethylase activity, transcription activation activity (e.g., VP16 or VP64), transcription repression activity, transcription release factor activity, histone modification activity, RNA cleavage activity and nucleic acid binding activity. A Cas9 ortholog can also be in fusion with a protein that binds DNA molecules or other molecules, such as maltose binding protein (MBP), S-tag, Lex A DNA binding domain (DBD), GAL4A DNA binding domain, and herpes simplex virus (HSV) VP16.

[0200] A catalytically active and/or inactive Cas9 ortholog can be fused to a heterologous sequence (US20140068797 published 6 Mar. 2014). Suitable fusion partners include, but are not limited to, a polypeptide that provides an activity that indirectly increases transcription by acting directly on the target DNA or on a polypeptide (e.g., a histone or other DNA-binding protein) associated with the target DNA. Additional suitable fusion partners include, but are not limited to, a polypeptide that provides for methyltransferase activity, demethylase activity, acetyltransferase activity, deacetylase activity, kinase activity, phosphatase activity, ubiquitin ligase activity, deubiquitinating activity, adenylation activity, deadenylation activity, SUMOylating activity, deSUMOylating activity, ribosylation activity, deribosylation activity, myristoylation activity, or demyristoylation activity. Further suitable fusion partners include, but are not limited to, a polypeptide that directly provides for increased transcription of the target nucleic acid (e.g., a transcription activator or a fragment thereof, a protein or fragment thereof that recruits a transcription activator, a small molecule/drug-responsive transcription regulator, etc.). A catalytically inactive Cas can also be fused to a FokI nuclease to generate double-strand breaks (Guilinger et al. Nature Biotechnology, volume 32, number 6, June 2014). In some aspects, the Cas9 ortholog is a fusion protein further comprising a nuclease domain, a transcriptional activator domain, a transcriptional repressor domain, an epigenetic modification domain, a cleavage domain, a nuclear localization signal, a cell-penetrating domain, a translocation domain, a marker, or a transgene that is heterologous to the target polynucleotide sequence or to the cell from which said target polynucleotide sequence is obtained or derived. In some aspects, the nuclease fusion protein comprises Clo51 or Fok1.

[0201] The Cas9 orthologs described herein can be expressed and purified by methods known in the art, for example as described in WO/2016/186953 published 24 Nov. 2016.

[0202] A Cas endonuclease can comprise a heterologous nuclear localization sequence (NLS). A heterologous NLS amino acid sequence herein may be of sufficient strength to drive accumulation of a Cas protein in a detectable amount in the nucleus of a yeast cell herein, for example. An NLS may comprise one (monopartite) or more (e.g., bipartite) short sequences (e.g., 2 to 20 residues) of basic, positively charged residues (e.g., lysine and/or arginine), and can be located anywhere in a Cas amino acid sequence but such that it is exposed on the protein surface. An NLS may be operably linked to the N-terminus or C-terminus of a Cas protein herein, for example. Two or more NLS sequences can be linked to a Cas protein, for example, such as on both the N- and C-termini of a Cas protein. The Cas endonuclease gene can be operably linked to a SV40 nuclear targeting signal upstream of the Cas codon region and a bipartite VirD2 nuclear localization signal (Tinland et al. (1992) Proc. Natl. Acad. Sci. USA 89:7442-6) downstream of the Cas codon region. Non-limiting examples of suitable NLS sequences herein include those disclosed in U.S. Pat. Nos. 6,660,830 and 7,309,576.

[0203] An artificial (non-naturally occurring) Cas endonuclease may be produced from a native, or parental, Cas endonuclease molecule, by any means known in the art. In some aspects, this is achieved through mutagenesis of the gene encoding the endonuclease protein. In some aspects, mutagenesis is achieved via a method selected from the group consisting of: the use of a double-strand break inducing agent acting on the endonuclease gene; radiation mutagenesis; chemical mutagenesis; the addition, deletion, substitution, insertion, or alteration of at least one polynucleotide in the gene encoding the endonuclease; or the substitution of one or more codons for an amino acid. In some aspects, directed evolution of the endonuclease molecule may be employed to optimize the expression or activity of the Cas endonuclease, and may be achieved via stochastic or non-stochastic protein shuffling methods which are known in the art.

### Protospacer Adjacent Motif (PAM)

[0204] A “protospacer adjacent motif” (PAM) herein refers to a short nucleotide sequence adjacent to a target sequence (protospacer) that can be recognized (targeted) by a guide polynucleotide/Cas endonuclease system. In some aspects, the Cas endonuclease may not successfully recognize a target DNA sequence if the target DNA sequence is not adjacent to, or near, a PAM sequence. In some aspects, the PAM precedes the target sequence (e.g. Cas12a). In some aspects, the PAM follows the target sequence (e.g. S. pyogenes Cas9). The sequence and length of a PAM herein can differ depending on the Cas protein or Cas protein complex used. The PAM sequence can be of any length but is typically 1, 2, 3, 4, 5, 6, 7, 8, 9, 10, 11, 12, 13, 14, 15, 16, 17, 18, 19 or 20 nucleotides long.

[0205] A “randomized PAM” and “randomized protospacer adjacent motif” are used interchangeably herein, and refer to a random DNA sequence adjacent to a target sequence (protospacer) that is recognized (targeted) by a guide polynucleotide/Cas endonuclease system. The randomized PAM sequence can be of any length but is typically 1, 2, 3, 4, 5, 6, 7, 8, 9, 10, 11, 12, 13, 14, 15, 16, 17, 18, 19 or 20 nucleotides long. A randomized nucleotide includes anyone of the nucleotides A, C, G or T.

[0206] Many Cas endonucleases have been described to date that can recognize specific PAM sequences (WO2016186953 published 24 Nov. 2016, WO2016186946 published 24 Nov. 2016, and Zetsche B et al. 2015. Cell 163, 1013) and cleave the target DNA at a specific position. It is understood that based on the methods and embodiments described herein utilizing a novel guided Cas system one skilled in the art can now tailor these methods such that they can utilize any guided endonuclease system.

[0207] PAM sequences that correspond to some of the Cas9 orthologs of the instant invention are described in Tables 4-50.

### Guide Polynucleotides

[0208] The guide polynucleotide enables target recognition, binding, and optionally cleavage by the Cas endonuclease, and can be a single molecule or a double molecule. The guide polynucleotide sequence can be a RNA sequence, a DNA sequence, or a combination thereof (a RNA-DNA combination sequence). Optionally, the guide polynucleotide can comprise at least one nucleotide, phosphodiester bond or linkage modification such as, but not limited, to Locked Nucleic Acid (LNA), 5-methyl dC, 2,6-Diaminopurine, 2′-Fluoro A, 2′-Fluoro U, 2′-O-Methyl RNA, phosphorothioate bond, linkage to a cholesterol molecule, linkage to a polyethylene glycol molecule, linkage to a spacer 18 (hexaethylene glycol chain) molecule, or 5′ to 3′ covalent linkage resulting in circularization. A guide polynucleotide that solely comprises ribonucleic acids is also referred to as a “guide RNA” or “gRNA” (US20150082478 published 19 Mar. 2015 and US20150059010 published 26 Feb. 2015). A guide polynucleotide may be engineered or synthetic.

[0209] The guide polynucleotide includes a chimeric non-naturally occurring guide RNA comprising regions that are not found together in nature (i.e., they are heterologous with respect to each other). For example, a chimeric non-naturally occurring guide RNA comprising a first nucleotide sequence domain (referred to as Variable Targeting domain or VT domain) that can hybridize to a nucleotide sequence in a target DNA, linked to a second nucleotide sequence that can recognize the Cas endonuclease, such that the first and second nucleotide sequence are not found linked together in nature.

[0210] The guide polynucleotide can be a double molecule (also referred to as duplex guide polynucleotide) comprising a crNucleotide sequence and a tracrNucleotide sequence. The crNucleotide includes a first nucleotide sequence domain (referred to as Variable Targeting domain or VT domain) that can hybridize to a nucleotide sequence in a target DNA and a second nucleotide sequence (also referred to as a tracr mate sequence) that is part of a Cas endonuclease recognition (CER) domain. The tracr mate sequence can hybridized to a tracrNucleotide along a region of complementarity and together form the Cas endonuclease recognition domain or CER domain. The CER domain is capable of interacting with a Cas endonuclease polypeptide. The crNucleotide and the tracrNucleotide of the duplex guide polynucleotide can be RNA, DNA, and/or RNA-DNA-combination sequences.

[0211] In some embodiments, the crNucleotide molecule of the duplex guide polynucleotide is referred to as “crDNA” (when composed of a contiguous stretch of DNA nucleotides) or “crRNA” (when composed of a contiguous stretch of RNA nucleotides), or “crDNA-RNA” (when composed of a combination of DNA and RNA nucleotides). The crNucleotide can comprise a fragment of the crRNA naturally occurring in Bacteria and Archaea. The size of the fragment of the crRNA naturally occurring in Bacteria and Archaea that can be present in a crNucleotide disclosed herein can range from, but is not limited to, 2, 3, 4, 5, 6, 7, 8, 9, 10, 11, 12, 13, 14, 15, 16, 17, 18, 19, 20 or more nucleotides.

[0212] The tracrRNA (trans-activating CRISPR RNA) comprises, in the 5′-to-3′ direction, (i) an “anti-repeat” sequence that anneals with the repeat region of CRISPR type II crRNA and (ii) a stem loop-comprising portion (Deltcheva et al., Nature 471:602-607). The duplex guide polynucleotide can form a complex with a Cas endonuclease, wherein said guide polynucleotide/Cas endonuclease complex (also referred to as a guide polynucleotide/Cas endonuclease system) can direct the Cas endonuclease to a genomic target site, enabling the Cas endonuclease to recognize, bind to, and optionally nick or cleave (introduce a single or double-strand break) into the target site. (US20150082478 published 19 Mar. 2015 and US20150059010 published 26 Feb. 2015). In some embodiments, the tracrNucleotide is referred to as “tracrRNA” (when composed of a contiguous stretch of RNA nucleotides) or “tracrDNA” (when composed of a contiguous stretch of DNA nucleotides) or “tracrDNA-RNA” (when composed of a combination of DNA and RNA nucleotides.

[0213] In one embodiment, the RNA that guides the RNA/Cas endonuclease complex is a duplexed RNA comprising a duplex crRNA-tracrRNA.

[0214] In one aspect, the guide polynucleotide is a guide polynucleotide capable of forming a PGEN as described herein, wherein said guide polynucleotide comprises a first nucleotide sequence domain that is complementary to a nucleotide sequence in a target DNA, and a second nucleotide sequence domain that interacts with said Cas endonuclease polypeptide.

[0215] In one aspect, the guide polynucleotide is a guide polynucleotide described herein, wherein the first nucleotide sequence and the second nucleotide sequence domain is selected from the group consisting of a DNA sequence, a RNA sequence, and a combination thereof.

[0216] In one aspect, the guide polynucleotide is a guide polynucleotide described herein, wherein the first nucleotide sequence and the second nucleotide sequence domain is selected from the group consisting of RNA backbone modifications that enhance stability, DNA backbone modifications that enhance stability, and a combination thereof (see Kanasty et al., 2013, Common RNA-backbone modifications, Nature Materials 12:976-977; US20150082478 published 19 Mar. 2015 and US20150059010 published 26 Feb. 2015)

[0217] The guide RNA includes a dual molecule comprising a chimeric non-naturally occurring crRNA linked to at least one tracrRNA. A chimeric non-naturally occurring crRNA includes a crRNA that comprises regions that are not found together in nature (i.e., they are heterologous with each other. For example, a crRNA comprising a first nucleotide sequence domain (referred to as Variable Targeting domain or VT domain) that can hybridize to a nucleotide sequence in a target DNA, linked to a second nucleotide sequence (also referred to as a tracr mate sequence) such that the first and second sequence are not found linked together in nature.

[0218] The guide polynucleotide can also be a single molecule (also referred to as single guide polynucleotide) comprising a crNucleotide sequence linked to a tracrNucleotide sequence. The single guide polynucleotide comprises a first nucleotide sequence domain (referred to as Variable Targeting domain or VT domain) that can hybridize to a nucleotide sequence in a target DNA and a Cas endonuclease recognition domain (CER domain), that interacts with a Cas endonuclease polypeptide.

[0219] The term “variable targeting domain” or “VT domain” is used interchangeably herein and includes a nucleotide sequence that can hybridize (is complementary) to one strand (nucleotide sequence) of a double strand DNA target site. The % complementation between the first nucleotide sequence domain (VT domain) and the target sequence can be at least 50%, 51%, 52%, 53%, 54%, 55%, 56%, 57%, 58%, 59%, 60%, 61%, 62%, 63%, 63%, 65%, 66%, 67%, 68%, 69%, 70%, 71%, 72%, 73%, 74%, 75%, 76%, 77%, 78%, 79%, 80%, 81%, 82%, 83%, 84%, 85%, 86%, 87%, 88%, 89%, 90%, 91%, 92%, 93%, 94%, 95%, 96%, 97%, 98%, 99% or 100%. The variable targeting domain can be at least 12, 13, 14, 15, 16, 17, 18, 19, 20, 21, 22, 23, 24, 25, 26, 27, 28, 29 or 30 nucleotides in length.

[0220] The VT domain and/or the CER domain of a single guide polynucleotide can comprise a RNA sequence, a DNA sequence, or a RNA-DNA-combination sequence. The single guide polynucleotide being comprised of sequences from the crNucleotide and the tracrNucleotide may be referred to as “single guide RNA” (when composed of a contiguous stretch of RNA nucleotides) or “single guide DNA” (when composed of a contiguous stretch of DNA nucleotides) or “single guide RNA-DNA” (when composed of a combination of RNA and DNA nucleotides). The single guide polynucleotide can form a complex with a Cas endonuclease, wherein said guide polynucleotide/Cas endonuclease complex (also referred to as a guide polynucleotide/Cas endonuclease system) can direct the Cas endonuclease to a genomic target site, enabling the Cas endonuclease to recognize, bind to, and optionally nick or cleave (introduce a single or double-strand break) the target site. (US20150082478 published 19 Mar. 2015 and US20150059010 published 26 Feb. 2015).

[0221] A chimeric non-naturally occurring single guide RNA (sgRNA) includes a sgRNA that comprises regions that are not found together in nature (i.e., they are heterologous with each other. For example, a sgRNA comprising a first nucleotide sequence domain (referred to as Variable Targeting domain or VT domain) that can hybridize to a nucleotide sequence in a target DNA linked to a second nucleotide sequence (also referred to as a tracr mate sequence) that are not found linked together in nature.

[0222] The nucleotide sequence linking the crNucleotide and the tracrNucleotide of a single guide polynucleotide can comprise a RNA sequence, a DNA sequence, or a RNA-DNA combination sequence. In one embodiment, the nucleotide sequence linking the crNucleotide and the tracrNucleotide of a single guide polynucleotide (also referred to as “loop”) can be at least 3, 4, 5, 6, 7, 8, 9, 10, 11, 12, 13, 14, 15, 16, 17, 18, 19, 20, 21, 22, 23, 24, 25, 26, 27, 28, 29, 30, 31, 32, 33, 34, 35, 36, 37, 38, 39, 40, 41, 42, 43, 44, 45, 46, 47, 48, 49, 50, 51, 52, 53, 54, 55, 56, 57, 58, 59, 60, 61, 62, 63, 64, 65, 66, 67, 68, 69, 70, 71, 72, 73, 74, 75, 76, 77, 78, 78, 79, 80, 81, 82, 83, 84, 85, 86, 87, 88, 89, 90, 91, 92, 93, 94, 95, 96, 97, 98, 99 or 100 nucleotides in length. In another embodiment, the nucleotide sequence linking the crNucleotide and the tracrNucleotide of a single guide polynucleotide can comprise a tetraloop sequence, such as, but not limiting to a GAAA tetraloop sequence.

[0223] The guide polynucleotide can be produced by any method known in the art, including chemically synthesizing guide polynucleotides (such as but not limiting to Hendel et al. 2015, Nature Biotechnology 33, 985-989), in vitro generated guide polynucleotides, and/or self-splicing guide RNAs (such as but not limited to Xie et al. 2015, PNAS 112:3570-3575).

[0224] A method of expressing RNA components such as gRNA in eukaryotic cells for performing Cas9-mediated DNA targeting has been to use RNA polymerase III (Pol III) promoters, which allow for transcription of RNA with precisely defined, unmodified, 5′- and 3′-ends (DiCarlo et al., Nucleic Acids Res. 41:4336-4343; Ma et al., Mol. Ther. Nucleic Acids 3: e161). This strategy has been successfully applied in cells of several different species including maize and soybean (US20150082478, published on Mar. 19, 2015). Methods for expressing RNA components that do not have a 5′ cap have been described (WO 2016/025131, published on Feb. 18, 2016).

[0225] A single guide RNA (sgRNA) molecule may comprise a VT domain.

[0226] A single guide RNA (sgRNA) molecule may comprise a crRNA repeat. In some aspects, the crRNA repeat is selected from the group consisting of: SEQID NO: 171-255.

[0227] A single guide RNA (sgRNA) molecule may comprise a loop.

[0228] A single guide RNA (sgRNA) molecule may comprise an anti-repeat. In some aspects, the anti-repeat is selected from the group consisting of: SEQID NO: 256-340.

[0229] A single guide RNA (sgRNA) molecule may comprise A 3′ tracrRNA. In some aspects, the 3′ tracrRNA is selected from the group consisting of: SEQID NO: 341-425.

[0230] The terms “single guide RNA” and “sgRNA” are used interchangeably herein and relate to a synthetic fusion of two RNA molecules, a crRNA (CRISPR RNA) comprising a variable targeting domain (linked to a tracr mate sequence that hybridizes to a tracrRNA), fused to a tracrRNA (trans-activating CRISPR RNA). The single guide RNA can comprise a crRNA or crRNA fragment and a tracrRNA or tracrRNA fragment of the type II CRISPR/Cas9 system that can form a complex with a type II Cas9 endonuclease, wherein said guide RNA/Cas9 endonuclease complex can direct the Cas9 endonuclease to a DNA target site, enabling the Cas9 endonuclease to recognize, bind to, and optionally nick or cleave (introduce a single or double strand break) the DNA target site.

[0231] In some aspects, the sgRNA is selected from the group consisting of: SEQID NO: 426-510.

[0232] Single guide RNAs targeting a target site in the genome of an organism can be designed by changing the Variable Targeting Domain (VT) of any of the guide polynucleotides described herein, with any random nucleotide that can hybridize to any desired target sequence.

[0233] In some embodiments, a subject nucleic acid (e.g., a guide polynucleotide, a nucleic acid comprising a nucleotide sequence encoding a guide polynucleotide; a nucleic acid encoding Cas9 endonuclease of the present disclosure; a crRNA or a nucleotide encoding a crRNA, a tracrRNA or a nucleotide encoding a tracrRNA, a nucleotide encoding a VT domain, a nucleotide encoding a CER domain, etc.) comprises a modification or sequence that provides for an additional desirable feature (e.g., modified or regulated stability; subcellular targeting; tracking, e.g., a fluorescent label; a binding site for a protein or protein complex; etc.). Nucleotide sequence modification of the guide polynucleotide, VT domain and/or CER domain can be selected from, but not limited to, the group consisting of a 5′ cap, a 3′ polyadenylated tail, a riboswitch sequence, a stability control sequence, a sequence that forms a dsRNA duplex, a modification or sequence that targets the guide poly nucleotide to a subcellular location, a modification or sequence that provides for tracking, a modification or sequence that provides a binding site for proteins, a Locked Nucleic Acid (LNA), a 5-methyl dC nucleotide, a 2,6-Diaminopurine nucleotide, a 2′-Fluoro A nucleotide, a 2′-Fluoro U nucleotide; a 2′-O-Methyl RNA nucleotide, a phosphorothioate bond, linkage to a cholesterol molecule, linkage to a polyethylene glycol molecule, linkage to a spacer 18 molecule, a 5′ to 3′ covalent linkage, or any combination thereof. These modifications can result in at least one additional beneficial feature, wherein the additional beneficial feature is selected from the group of a modified or regulated stability, a subcellular targeting, tracking, a fluorescent label, a binding site for a protein or protein complex, modified binding affinity to complementary target sequence, modified resistance to cellular degradation, and increased cellular permeability.

[0234] Functional variants of a guide polynucleotide of the present disclosure can comprise a modified guide polynucleotide wherein the modification comprises adding, removing, or otherwise altering loops and/or hairpins in the single guide RNA.

[0235] Functional variants of a guide polynucleotide of the present disclosure can comprise a modified guide polynucleotide wherein the modification comprises one or more modified nucleotides in the nucleotide sequence, wherein the one or more modified nucleotides comprises at least one non-naturally-occurring nucleotide, nucleotide mimetic (as described in US application US2014/0068797, published Mar. 6, 2014), or analog thereof, or wherein the one or more modified nucleotides are selected from the group consisting of 2′-0-methylanalogs, 2′-fluoro analogs 2-aminopurine, 5-bromo-uridine, pseudouridine, and 7-methylguanosine.

[0236] In one aspect, the functional variant of the guide RNA can form a guide RNA/Cas9 endonuclease complex that can recognize, bind to, and optionally nick or cleave a target sequence.

### Guide Polynucleotide/Cas Endonuclease Complexes

[0237] A guide polynucleotide/Cas endonuclease complex described herein is capable of recognizing, binding to, and optionally nicking, unwinding, or cleaving all or part of a target sequence.

[0238] A guide polynucleotide/Cas endonuclease complex that can cleave both strands of a DNA target sequence typically comprises a Cas protein that has all of its endonuclease domains in a functional state (e.g., wild type endonuclease domains or variants thereof retaining some or all activity in each endonuclease domain). Thus, a wild type Cas protein (e.g., a Cas protein disclosed herein), or a variant thereof retaining some or all activity in each endonuclease domain of the Cas protein, is a suitable example of a Cas endonuclease that can cleave both strands of a DNA target sequence.

[0239] A guide polynucleotide/Cas endonuclease complex that can cleave one strand of a DNA target sequence can be characterized herein as having nickase activity (e.g., partial cleaving capability). A Cas nickase typically comprises one functional endonuclease domain that allows the Cas to cleave only one strand (i.e., make a nick) of a DNA target sequence. For example, a Cas nickase may comprise (i) a mutant, dysfunctional RuvC domain and (ii) a functional HNH domain (e.g., wild type HNH domain). As another example, a Cas nickase may comprise (i) a functional RuvC domain (e.g., wild type RuvC domain) and (ii) a mutant, dysfunctional HNH domain. Non-limiting examples of Cas nickases suitable for use herein are disclosed in US20140189896 published on 3 Jul. 2014. A pair of Cas nickases can be used to increase the specificity of DNA targeting. In general, this can be done by providing two Cas nickases that, by virtue of being associated with RNA components with different guide sequences, target and nick nearby DNA sequences on opposite strands in the region for desired targeting. Such nearby cleavage of each DNA strand creates a double-strand break (i.e., a DSB with single-stranded overhangs), which is then recognized as a substrate for non-homologous-end-joining, NHEJ (prone to imperfect repair leading to mutations) or homologous recombination, HR. Each nick in these embodiments can be at least 5, between 5 and 10, at least 10, between 10 and 15, at least 15, between 15 and 20, at least 20, between 20 and 30, at least 30, between 30 and 40, at least 40, between 40 and 50, at least 50, between 50 and 60, at least 60, between 60 and 70, at least 70, between 70 and 80, at least 80, between 80 and 90, at least 90, between 90 and 100, or 100 or greater (or any number between 5 and 100) bases apart from each other, for example. One or two Cas nickase proteins herein can be used in a Cas nickase pair. For example, a Cas nickase with a mutant RuvC domain, but functioning HNH domain (i.e., Cas HNH+/RuvC−), can be used (e.g., Streptococcus pyogenes Cas HNH+/RuvC−). Each Cas nickase (e.g., Cas HNH+/RuvC−) can be directed to specific DNA sites nearby each other (up to 100 base pairs apart) by using suitable RNA components herein with guide RNA sequences targeting each nickase to each specific DNA site.

[0240] A guide polynucleotide/Cas endonuclease complex in certain embodiments can bind to a DNA target site sequence, but does not cleave any strand at the target site sequence. Such a complex may comprise a Cas protein in which all of its nuclease domains are mutant, dysfunctional. For example, a Cas protein that can bind to a DNA target site sequence, but does not cleave any strand at the target site sequence, may comprise both a mutant, dysfunctional RuvC domain and a mutant, dysfunctional HNH domain. A Cas protein herein that binds, but does not cleave, a target DNA sequence can be used to modulate gene expression, for example, in which case the Cas protein could be fused with a transcription factor (or portion thereof) (e.g., a repressor or activator, such as any of those disclosed herein).

[0241] In one embodiment of the disclosure, the guide polynucleotide/Cas endonuclease complex is a guide polynucleotide/Cas endonuclease complex (PGEN) comprising at least one guide polynucleotide and at least one Cas endonuclease polypeptide. In some aspects, the Cas endonuclease polypeptide comprises at least one protein subunit of another Cas protein, or a functional fragment thereof, wherein said guide polynucleotide is a chimeric non-naturally occurring guide polynucleotide, wherein said guide polynucleotide/Cas endonuclease complex is capable of recognizing, binding to, and optionally nicking, unwinding, or cleaving all or part of a target sequence.

[0242] In some aspects, the PGEN is a ribonucleoprotein complex (RNP), wherein the Cas 9 ortholog is provided as a protein and the guide polynucleotide is provided as a ribonucleotide.

[0243] The Cas endonuclease protein can be a Cas9 ortholog as disclosed herein.

[0244] In one embodiment of the disclosure, the guide polynucleotide/Cas effector complex is a guide polynucleotide/Cas endonuclease complex (PGEN) comprising at least one guide polynucleotide and a Cas9 ortholog endonuclease, wherein said guide polynucleotide/Cas endonuclease complex is capable of recognizing, binding to, and optionally nicking, unwinding, or cleaving all or part of a target sequence.

[0245] The PGEN can be a guide polynucleotide/Cas endonuclease complex, wherein said Cas endonuclease further comprises one copy or multiple copies of at least one protein subunit, or a functional fragment thereof, of an additional Cas protein.

[0246] In one aspect, the guide polynucleotide/Cas endonuclease complex (PGEN) described herein is a PGEN, wherein said Cas endonuclease is covalently or non-covalently linked to at least one Cas protein subunit, or functional fragment thereof. The PGEN can be a guide polynucleotide/Cas endonuclease complex, wherein said Cas endonuclease polypeptide is covalently or non-covalently linked, or assembled to one copy or multiple copies of at least one protein subunit, or a functional fragment thereof, of a Cas protein selected from the group consisting of a Cas1 protein subunit, a Cas2 protein subunit, a Cas4 protein subunit, and any combination thereof, in some aspects effectively forming a cleavage ready Cascade. The PGEN can be a guide polynucleotide/Cas endonuclease complex, wherein said Cas endonuclease is covalently or non-covalently linked or assembled to at least two different protein subunits of a Cas protein selected from the group consisting of a Cas1, a Cas2, and Cas4. The PGEN can be a guide polynucleotide/Cas endonuclease complex, wherein said Cas endonuclease is covalently or non-covalently linked to at least three different protein subunits, or functional fragments thereof, of a Cas protein selected from the group consisting of a Cas1, a Cas2, and Cas4, and any combination thereof.

[0247] Any component of the guide polynucleotide/Cas endonuclease complex, the guide polynucleotide/Cas endonuclease complex itself, as well as the polynucleotide modification template(s) and/or donor DNA(s), can be introduced into a heterologous cell or organism by any method known in the art.

[0248] Some uses for guide RNA/Cas9 endonuclease systems include but are not limited to modifying or replacing nucleotide sequences of interest (such as a regulatory elements), insertion of polynucleotides of interest, gene knock-out, gene-knock in, modification of splicing sites and/or introducing alternate splicing sites, modifications of nucleotide sequences encoding a protein of interest, amino acid and/or protein fusions, and gene silencing by expressing an inverted repeat into a gene of interest.

### Recombinant Constructs for Transformation of Cells

[0249] The disclosed guide polynucleotides, Cas endonucleases, polynucleotide modification templates, donor DNAs, guide polynucleotide/Cas endonuclease systems disclosed herein, and any one combination thereof, optionally further comprising one or more polynucleotide(s) of interest, can be introduced into a cell. Cells include, but are not limited to, human, non-human, animal, bacterial, fungal, insect, yeast, non-conventional yeast, and plant cells as well as plants and seeds produced by the methods described herein.

[0250] Standard recombinant DNA and molecular cloning techniques used herein are well known in the art and are described more fully in Sambrook et al., Molecular Cloning: A Laboratory Manual; Cold Spring Harbor Laboratory: Cold Spring Harbor, NY (1989). Transformation methods are well known to those skilled in the art and are described infra.

[0251] Vectors and constructs include circular plasmids, and linear polynucleotides, comprising a polynucleotide of interest and optionally other components including linkers, adapters, regulatory or analysis. In some examples a recognition site and/or target site can be comprised within an intron, coding sequence, 5′ UTRs, 3′ UTRs, and/or regulatory regions.

### Components for Expression and Utilization of Novel CRISPR-Cas Systems in Prokaryotic and Eukaryotic Cells

[0252] The invention further provides expression constructs for expressing in a prokaryotic or eukaryotic cell/organism a guide RNA/Cas system that is capable of recognizing, binding to, and optionally nicking, unwinding, or cleaving all or part of a target sequence.

[0253] In one embodiment, the expression constructs of the disclosure comprise a promoter operably linked to a nucleotide sequence encoding a Cas gene (or optimized sequence, including a Cas endonuclease gene described herein) and a promoter operably linked to a guide RNA of the present disclosure. The promoter is capable of driving expression of an operably linked nucleotide sequence in a prokaryotic or eukaryotic cell/organism.

[0254] Nucleotide sequence modification of the guide polynucleotide, VT domain and/or CER domain can be selected from, but not limited to, the group consisting of a 5′ cap, a 3′ polyadenylated tail, a riboswitch sequence, a stability control sequence, a sequence that forms a dsRNA duplex, a modification or sequence that targets the guide poly nucleotide to a subcellular location, a modification or sequence that provides for tracking, a modification or sequence that provides a binding site for proteins, a Locked Nucleic Acid (LNA), a 5-methyl dC nucleotide, a 2,6-Diaminopurine nucleotide, a 2′-Fluoro A nucleotide, a 2′-Fluoro U nucleotide; a 2′-O-Methyl RNA nucleotide, a phosphorothioate bond, linkage to a cholesterol molecule, linkage to a polyethylene glycol molecule, linkage to a spacer 18 molecule, a 5′ to 3′ covalent linkage, or any combination thereof. These modifications can result in at least one additional beneficial feature, wherein the additional beneficial feature is selected from the group of a modified or regulated stability, a subcellular targeting, tracking, a fluorescent label, a binding site for a protein or protein complex, modified binding affinity to complementary target sequence, modified resistance to cellular degradation, and increased cellular permeability.

[0255] A method of expressing RNA components such as gRNA in eukaryotic cells for performing Cas9-mediated DNA targeting has been to use RNA polymerase III (Pol III) promoters, which allow for transcription of RNA with precisely defined, unmodified, 5′- and 3′-ends (DiCarlo et al., Nucleic Acids Res. 41:4336-4343; Ma et al., Mol. Ther. Nucleic Acids 3: e161). This strategy has been successfully applied in cells of several different species including maize and soybean (US20150082478 published 19 Mar. 2015). Methods for expressing RNA components that do not have a 5′ cap have been described (WO2016/025131 published 18 Feb. 2016).

[0256] Various methods and compositions can be employed to obtain a cell or organism having a polynucleotide of interest inserted in a target site for a Cas endonuclease. Such methods can employ homologous recombination (HR) to provide integration of the polynucleotide of interest at the target site. In one method described herein, a polynucleotide of interest is introduced into the organism cell via a donor DNA construct.

[0257] The donor DNA construct further comprises a first and a second region of homology that flank the polynucleotide of interest. The first and second regions of homology of the donor DNA share homology to a first and a second genomic region, respectively, present in or flanking the target site of the cell or organism genome.

[0258] The donor DNA can be tethered to the guide polynucleotide. Tethered donor DNAs can allow for co-localizing target and donor DNA, useful in genome editing, gene insertion, and targeted genome regulation, and can also be useful in targeting post-mitotic cells where function of endogenous HR machinery is expected to be highly diminished (Mali et al., 2013, Nature Methods Vol. 10:957-963).

[0259] The amount of homology or sequence identity shared by a target and a donor polynucleotide can vary and includes total lengths and/or regions having unit integral values in the ranges of about 1-20 bp, 20-50 bp, 50-100 bp, 75-150 bp, 100-250 bp, 150-300 bp, 200-400 bp, 250-500 bp, 300-600 bp, 350-750 bp, 400-800 bp, 450-900 bp, 500-1000 bp, 600-1250 bp, 700-1500 bp, 800-1750 bp, 900-2000 bp, 1-2.5 kb, 1.5-3 kb, 2-4 kb, 2.5-5 kb, 3-6 kb, 3.5-7 kb, 4-8 kb, 5-10 kb, or up to and including the total length of the target site. These ranges include every integer within the range, for example, the range of 1-20 bp includes 1, 2, 3, 4, 5, 6, 7, 8, 9, 10, 11, 12, 13, 14, 15, 16, 17, 18, 19 and 20 bps. The amount of homology can also be described by percent sequence identity over the full aligned length of the two polynucleotides which includes percent sequence identity of about at least 50%, 55%, 60%, 65%, 70%, 71%, 72%, 73%, 74%, 75%, 76%, 77%, 78%, 79%, 80%, 81%, 82%, 83%, 84%, 85%, 86%, 87%, 88%, 89%, 90%, 91%, 92%, 93%, 94%, 95%, 96%, 97%, 98%, between 98% and 99%, 99%, between 99% and 100%, or 100%. Sufficient homology includes any combination of polynucleotide length, global percent sequence identity, and optionally conserved regions of contiguous nucleotides or local percent sequence identity, for example sufficient homology can be described as a region of 75-150 bp having at least 80% sequence identity to a region of the target locus. Sufficient homology can also be described by the predicted ability of two polynucleotides to specifically hybridize under high stringency conditions, see, for example, Sambrook et al., (1989) Molecular Cloning: A Laboratory Manual, (Cold Spring Harbor Laboratory Press, NY); Current Protocols in Molecular Biology, Ausubel et al., Eds (1994) Current Protocols, (Greene Publishing Associates, Inc. and John Wiley & Sons, Inc.); and, Tijssen (1993) Laboratory Techniques in Biochemistry and Molecular Biology—Hybridization with Nucleic Acid Probes, (Elsevier, New York).

[0260] The structural similarity between a given genomic region and the corresponding region of homology found on the donor DNA can be any degree of sequence identity that allows for homologous recombination to occur. For example, the amount of homology or sequence identity shared by the “region of homology” of the donor DNA and the “genomic region” of the organism genome can be at least 50%, 55%, 60%, 65%, 70%, 75%, 80%, 81%, 82%, 83%, 84%, 85%, 86%, 87%, 88%, 89%, 90%, 91%, 92%, 93%, 94%, 95%, 96%, 97%, 98%, 99% or 100% sequence identity, such that the sequences undergo homologous recombination

[0261] The region of homology on the donor DNA can have homology to any sequence flanking the target site. While in some instances the regions of homology share significant sequence homology to the genomic sequence immediately flanking the target site, it is recognized that the regions of homology can be designed to have sufficient homology to regions that may be further 5′ or 3′ to the target site. The regions of homology can also have homology with a fragment of the target site along with downstream genomic regions

[0262] In one embodiment, the first region of homology further comprises a first fragment of the target site and the second region of homology comprises a second fragment of the target site, wherein the first and second fragments are dissimilar.

### Polynucleotides of Interest

[0263] Polynucleotides of interest are further described herein and include polynucleotides reflective of the commercial markets and interests of those involved in the development of the crop. Crops and markets of interest change, and as developing nations open up world markets, new crops and technologies will emerge also. In addition, as our understanding of agronomic traits and characteristics such as yield and heterosis increase, the choice of genes for genetic engineering will change accordingly.

[0264] General categories of polynucleotides of interest include, for example, genes of interest involved in information, such as zinc fingers, those involved in communication, such as kinases, and those involved in housekeeping, such as heat shock proteins. More specific polynucleotides of interest include, but are not limited to, genes involved in crop yield, grain quality, crop nutrient content, starch and carbohydrate quality and quantity as well as those affecting kernel size, sucrose loading, protein quality and quantity, nitrogen fixation and/or utilization, fatty acid and oil composition, genes encoding proteins conferring resistance to abiotic stress (such as drought, nitrogen, temperature, salinity, toxic metals or trace elements, or those conferring resistance to toxins such as pesticides and herbicides), genes encoding proteins conferring resistance to biotic stress (such as attacks by fungi, viruses, bacteria, insects, and nematodes, and development of diseases associated with these organisms).

[0265] Agronomically important traits such as oil, starch, and protein content can be genetically altered in addition to using traditional breeding methods. Modifications include increasing content of oleic acid, saturated and unsaturated oils, increasing levels of lysine and sulfur, providing essential amino acids, and also modification of starch. Hordothionin protein modifications are described in U.S. Pat. Nos. 5,703,049, 5,885,801, 5,885,802, and 5,990,389.

[0266] Polynucleotide sequences of interest may encode proteins involved in providing disease or pest resistance. By “disease resistance” or “pest resistance” is intended that the plants avoid the harmful symptoms that are the outcome of the plant-pathogen interactions. Pest resistance genes may encode resistance to pests that have great yield drag such as rootworm, cutworm, European Corn Borer, and the like. Disease resistance and insect resistance genes such as lysozymes or cecropins for antibacterial protection, or proteins such as defensins, glucanases or chitinases for antifungal protection, or Bacillus thuringiensis endotoxins, protease inhibitors, collagenases, lectins, or glycosidases for controlling nematodes or insects are all examples of useful gene products. Genes encoding disease resistance traits include detoxification genes, such as against fumonisin (U.S. Pat. No. 5,792,931); avirulence (avr) and disease resistance (R) genes (Jones et al. (1994) Science 266:789; Martin et al. (1993) Science 262:1432; and Mindrinos et al. (1994) Cell 78:1089); and the like. Insect resistance genes may encode resistance to pests that have great yield drag such as rootworm, cutworm, European Corn Borer, and the like. Such genes include, for example, Bacillus thuringiensis toxic protein genes (U.S. U.S. Pat. Nos. 5,366,892; 5,747,450; 5,736,514; 5,723,756; 5,593,881; and Geiser et al. (1986) Gene 48:109); and the like.

[0267] An “herbicide resistance protein” or a protein resulting from expression of an “herbicide resistance-encoding nucleic acid molecule” includes proteins that confer upon a cell the ability to tolerate a higher concentration of an herbicide than cells that do not express the protein, or to tolerate a certain concentration of an herbicide for a longer period of time than cells that do not express the protein. Herbicide resistance traits may be introduced into plants by genes coding for resistance to herbicides that act to inhibit the action of acetolactate synthase (ALS, also referred to as acetohydroxyacid synthase, AHAS), in particular the sulfonylurea (UK: sulphonylurea) type herbicides, genes coding for resistance to herbicides that act to inhibit the action of glutamine synthase, such as phosphinothricin or basta (e.g., the bar gene), glyphosate (e.g., the EPSP synthase gene and the GAT gene), HPPD inhibitors (e.g, the HPPD gene) or other such genes known in the art. See, for example, U.S. Pat. Nos. 7,626,077, 5,310,667, 5,866,775, 6,225,114, 6,248,876, 7,169,970, 6,867,293, and 9,187,762. The bar gene encodes resistance to the herbicide basta, the nptII gene encodes resistance to the antibiotics kanamycin and geneticin, and the ALS-gene mutants encode resistance to the herbicide chlorsulfuron.

[0268] Furthermore, it is recognized that the polynucleotide of interest may also comprise antisense sequences complementary to at least a portion of the messenger RNA (mRNA) for a targeted gene sequence of interest. Antisense nucleotides are constructed to hybridize with the corresponding mRNA. Modifications of the antisense sequences may be made as long as the sequences hybridize to and interfere with expression of the corresponding mRNA. In this manner, antisense constructions having 70%, 80%, or 85% sequence identity to the corresponding antisense sequences may be used. Furthermore, portions of the antisense nucleotides may be used to disrupt the expression of the target gene. Generally, sequences of at least 50 nucleotides, 100 nucleotides, 200 nucleotides, or greater may be used.

[0269] In addition, the polynucleotide of interest may also be used in the sense orientation to suppress the expression of endogenous genes in plants. Methods for suppressing gene expression in plants using polynucleotides in the sense orientation are known in the art. The methods generally involve transforming plants with a DNA construct comprising a promoter that drives expression in a plant operably linked to at least a portion of a nucleotide sequence that corresponds to the transcript of the endogenous gene. Typically, such a nucleotide sequence has substantial sequence identity to the sequence of the transcript of the endogenous gene, generally greater than about 65% sequence identity, about 85% sequence identity, or greater than about 95% sequence identity. See U.S. Pat. Nos. 5,283,184 and 5,034,323.

[0270] The polynucleotide of interest can also be a phenotypic marker. A phenotypic marker is screenable or a selectable marker that includes visual markers and selectable markers whether it is a positive or negative selectable marker. Any phenotypic marker can be used. Specifically, a selectable or screenable marker comprises a DNA segment that allows one to identify, or select for or against a molecule or a cell that comprises it, often under particular conditions. These markers can encode an activity, such as, but not limited to, production of RNA, peptide, or protein, or can provide a binding site for RNA, peptides, proteins, inorganic and organic compounds or compositions and the like.

[0271] Examples of selectable markers include, but are not limited to, DNA segments that comprise restriction enzyme sites; DNA segments that encode products which provide resistance against otherwise toxic compounds including antibiotics, such as, spectinomycin, ampicillin, kanamycin, tetracycline, Basta, neomycin phosphotransferase II (NEO) and hygromycin phosphotransferase (HPT)); DNA segments that encode products which are otherwise lacking in the recipient cell (e.g., tRNA genes, auxotrophic markers); DNA segments that encode products which can be readily identified (e.g., phenotypic markers such as β-galactosidase, GUS; fluorescent proteins such as green fluorescent protein (GFP), cyan (CFP), yellow (YFP), red (RFP), and cell surface proteins); the generation of new primer sites for PCR (e.g., the juxtaposition of two DNA sequence not previously juxtaposed), the inclusion of DNA sequences not acted upon or acted upon by a restriction endonuclease or other DNA modifying enzyme, chemical, etc.; and, the inclusion of a DNA sequences required for a specific modification (e.g., methylation) that allows its identification.

[0272] Additional selectable markers include genes that confer resistance to herbicidal compounds, such as sulphonylureas, glufosinate ammonium, bromoxynil, imidazolinones, and 2,4-dichlorophenoxyacetate (2,4-D). See for example, Acetolactase synthase (ALS) for resistance to sulfonylureas, imidazolinones, triazolopyrimidine sulfonamides, pyrimidinylsalicylates and sulphonylaminocarbonyl-triazolinones (Shaner and Singh, 1997, Herbicide Activity: Toxicol Biochem Mol Biol 69-110); glyphosate resistant 5-enolpyruvylshikimate-3-phosphate (EPSPS) (Saroha et al. 1998, J. Plant Biochemistry & Biotechnology Vol 7:65-72);

[0273] Polynucleotides of interest includes genes that can be stacked or used in combination with other traits, such as but not limited to herbicide resistance or any other trait described herein. Polynucleotides of interest and/or traits can be stacked together in a complex trait locus as described in US20130263324 published 3 Oct. 2013 and in WO/2013/112686, published 1 Aug. 2013.

[0274] A polypeptide of interest includes any protein or polypeptide that is encoded by a polynucleotide of interest described herein.

[0275] Further provided are methods for identifying at least one plant cell, comprising in its genome, a polynucleotide of interest integrated at the target site. A variety of methods are available for identifying those plant cells with insertion into the genome at or near to the target site. Such methods can be viewed as directly analyzing a target sequence to detect any change in the target sequence, including but not limited to PCR methods, sequencing methods, nuclease digestion, Southern blots, and any combination thereof. See, for example, US20090133152 published 21 May 2009. The method also comprises recovering a plant from the plant cell comprising a polynucleotide of interest integrated into its genome. The plant may be sterile or fertile. It is recognized that any polynucleotide of interest can be provided, integrated into the plant genome at the target site, and expressed in a plant.

### Optimization of Sequences for Expression in Plants

[0276] Methods are available in the art for synthesizing plant-preferred genes. See, for example, U.S. Pat. Nos. 5,380,831, and 5,436,391, and Murray et al. (1989) Nucleic Acids Res. 17:477-498. Additional sequence modifications are known to enhance gene expression in a plant host. These include, for example, elimination of: one or more sequences encoding spurious polyadenylation signals, one or more exon-intron splice site signals, one or more transposon-like repeats, and other such well-characterized sequences that may be deleterious to gene expression. The G-C content of the sequence may be adjusted to levels average for a given plant host, as calculated by reference to known genes expressed in the host plant cell. When possible, the sequence is modified to avoid one or more predicted hairpin secondary mRNA structures. Thus, “a plant-optimized nucleotide sequence” of the present disclosure comprises one or more of such sequence modifications.

### Expression Elements

[0277] Any polynucleotide encoding a Cas protein or other CRISPR system component disclosed herein may be functionally linked to a heterologous expression element, to facilitate transcription or regulation in a host cell. Such expression elements include but are not limited to: promoter, leader, intron, and terminator. Expression elements may be “minimal”-meaning a shorter sequence derived from a native source, that still functions as an expression regulator or modifier. Alternatively, an expression element may be “optimized”-meaning that its polynucleotide sequence has been altered from its native state in order to function with a more desirable characteristic in a particular host cell. Alternatively, an expression element may be “synthetic”-meaning that it is designed in silico and synthesized for use in a host cell. Synthetic expression elements may be entirely synthetic, or partially synthetic (comprising a fragment of a naturally-occurring polynucleotide sequence).

[0278] It has been shown that certain promoters are able to direct RNA synthesis at a higher rate than others. These are called “strong promoters”. Certain other promoters have been shown to direct RNA synthesis at higher levels only in particular types of cells or tissues and are often referred to as “tissue specific promoters”, or “tissue-preferred promoters” if the promoters direct RNA synthesis preferably in certain tissues but also in other tissues at reduced levels.

[0279] A plant promoter includes a promoter capable of initiating transcription in a plant cell. For a review of plant promoters, see, Potenza et al., 2004, In vitro Cell Dev Biol 40:1-22; Porto et al., 2014, Molecular Biotechnology (2014), 56 (1), 38-49.

[0280] Constitutive promoters include, for example, the core CaMV 35S promoter (Odell et al., (1985) Nature 313:810-2); rice actin (McElroy et al., (1990) Plant Cell 2:163-71); ubiquitin (Christensen et al., (1989) Plant Mol Biol 12:619-32; ALS promoter (U.S. Pat. No. 5,659,026) and the like.

[0281] Tissue-preferred promoters can be utilized to target enhanced expression within a particular plant tissue. Tissue-preferred promoters include, for example, WO2013103367 published 11 Jul. 2013, Kawamata et al., (1997) Plant Cell Physiol 38:792-803; Hansen et al., (1997) Mol Gen Genet 254:337-43; Russell et al., (1997) Transgenic Res 6:157-68; Rinehart et al., (1996) Plant Physiol 112:1331-41; Van Camp et al., (1996) Plant Physiol 112:525-35; Canevascini et al., (1996) Plant Physiol 112:513-524; Lam, (1994) Results Probl Cell Differ 20:181-96; and Guevara-Garcia et al., (1993) Plant J 4:495-505. Leaf-preferred promoters include, for example, Yamamoto et al., (1997) Plant J 12:255-65; Kwon et al., (1994) Plant Physiol 105:357-67; Yamamoto et al., (1994) Plant Cell Physiol 35:773-8; Gotor et al., (1993) Plant J 3:509-18; Orozco et al., (1993) Plant Mol Biol 23:1129-38; Matsuoka et al., (1993) Proc. Natl. Acad. Sci. USA 90:9586-90; Simpson et al., (1958) EMBO J 4:2723-9; Timko et al., (1988) Nature 318:57-8. Root-preferred promoters include, for example, Hire et al., (1992) Plant Mol Biol 20:207-18 (soybean root-specific glutamine synthase gene); Miao et al., (1991) Plant Cell 3:11-22 (cytosolic glutamine synthase (GS)); Keller and Baumgartner, (1991) Plant Cell 3:1051-61 (root-specific control element in the GRP 1.8 gene of French bean); Sanger et al., (1990) Plant Mol Biol 14:433-43 (root-specific promoter of A. tumefaciens mannopine synthase (MAS)); Bogusz et al., (1990) Plant Cell 2:633-41 (root-specific promoters isolated from Parasponia andersonii and Trema tomentosa); Leach and Aoyagi, (1991) Plant Sci 79:69-76 (A. rhizogenes rolC and rolD root-inducing genes); Teeri et al., (1989) EMBO J 8:343-50 (Agrobacterium wound-induced TR1′ and TR2′ genes); VfENOD-GRP3 gene promoter (Kuster et al., (1995) Plant Mol Biol 29:759-72); and roll promoter (Capana et al., (1994) Plant Mol Biol 25:681-91; phaseolin gene (Murai et al., (1983) Science 23:476-82; Sengopta-Gopalen et al., (1988) Proc. Natl. Acad. Sci. USA 82:3320-4). See also, U.S. Pat. Nos. 5,837,876; 5,750,386; 5,633,363; 5,459,252; 5,401,836; 5,110,732 and 5,023,179.

[0282] Seed-preferred promoters include both seed-specific promoters active during seed development, as well as seed-germinating promoters active during seed germination. See, Thompson et al., (1989) BioEssays 10:108. Seed-preferred promoters include, but are not limited to, Cim1 (cytokinin-induced message); cZ19B1 (maize 19 kDa zein); and milps (myo-inositol-1-phosphate synthase); and for example, those disclosed in WO2000011177 published 2 Mar. 2000 and U.S. Pat. No. 6,225,529. For dicots, seed-preferred promoters include, but are not limited to, bean β-phaseolin, napin, β-conglycinin, soybean lectin, cruciferin, and the like. For monocots, seed-preferred promoters include, but are not limited to, maize 15 kDa zein, 22 kDa zein, 27 kDa gamma zein, waxy, shrunken 1, shrunken 2, globulin 1, oleosin, and nuc1. See also, WO2000012733 published 9 Mar. 2000, where seed-preferred promoters from END1 and END2 genes are disclosed.

[0283] Chemical inducible (regulated) promoters can be used to modulate the expression of a gene in a prokaryotic and eukaryotic cell or organism through the application of an exogenous chemical regulator. The promoter may be a chemical-inducible promoter, where application of the chemical induces gene expression, or a chemical-repressible promoter, where application of the chemical represses gene expression. Chemical-inducible promoters include, but are not limited to, the maize In2-2 promoter, activated by benzene sulfonamide herbicide safeners (De Veylder et al., (1997) Plant Cell Physiol 38:568-77), the maize GST promoter (GST-II-27, WO1993001294 published 21 Jan. 1993), activated by hydrophobic electrophilic compounds used as pre-emergent herbicides, and the tobacco PR-la promoter (Ono et al., (2004) Biosci Biotechnol Biochem 68:803-7) activated by salicylic acid. Other chemical-regulated promoters include steroid-responsive promoters (see, for example, the glucocorticoid-inducible promoter (Schena et al., (1991) Proc. Natl. Acad. Sci. USA 88:10421-5; McNellis et al., (1998) Plant J 14:247-257); tetracycline-inducible and tetracycline-repressible promoters (Gatz et al., (1991) Mol Gen Genet 227:229-37; U.S. Pat. Nos. 5,814,618 and 5,789,156).

[0284] Pathogen inducible promoters induced following infection by a pathogen include, but are not limited to those regulating expression of PR proteins, SAR proteins, beta-1,3-glucanase, chitinase, etc.

[0285] A stress-inducible promoter includes the RD29A promoter (Kasuga et al. (1999) Nature Biotechnol. 17:287-91). One of ordinary skill in the art is familiar with protocols for simulating stress conditions such as drought, osmotic stress, salt stress and temperature stress and for evaluating stress tolerance of plants that have been subjected to simulated or naturally-occurring stress conditions.

[0286] Another example of an inducible promoter useful in plant cells, is the ZmCAS1 promoter, described in US20130312137 published 21 Nov. 2013.

[0287] New promoters of various types useful in plant cells are constantly being discovered; numerous examples may be found in the compilation by Okamuro and Goldberg, (1989) In The Biochemistry of Plants, Vol. 115, Stumpf and Conn, eds (New York, NY: Academic Press), pp. 1-82.

Modification of Genomes with Novel CRISPR-Cas System Components

[0288] As described herein, a guided Cas endonuclease can recognize, bind to a DNA target sequence and introduce a single strand (nick) or double-strand break. Once a single or double-strand break is induced in the DNA, the cell's DNA repair mechanism is activated to repair the break. Error-prone DNA repair mechanisms can produce mutations at double-strand break sites. The most common repair mechanism to bring the broken ends together is the nonhomologous end-joining (NHEJ) pathway (Bleuyard et al., (2006) DNA Repair 5:1-12). The structural integrity of chromosomes is typically preserved by the repair, but deletions, insertions, or other rearrangements (such as chromosomal translocations) are possible (Siebert and Puchta, 2002, Plant Cell 14:1121-31; Pacher et al., 2007, Genetics 175:21-9).

[0289] DNA double-strand breaks appear to be an effective factor to stimulate homologous recombination pathways (Puchta et al., (1995) Plant Mol Biol 28:281-92; Tzfira and White, (2005) Trends Biotechnol 23:567-9; Puchta, (2005) J Exp Bot 56:1-14). Using DNA-breaking agents, a two- to nine-fold increase of homologous recombination was observed between artificially constructed homologous DNA repeats in plants (Puchta et al., (1995) Plant Mol Biol 28:281-92). In maize protoplasts, experiments with linear DNA molecules demonstrated enhanced homologous recombination between plasmids (Lyznik et al., (1991) Mol Gen Genet 230:209-18).

[0290] Homology-directed repair (HDR) is a mechanism in cells to repair double-stranded and single stranded DNA breaks. Homology-directed repair includes homologous recombination (HR) and single-strand annealing (SSA) (Lieber. 2010 Annu. Rev. Biochem. 79:181-211). The most common form of HDR is called homologous recombination (HR), which has the longest sequence homology requirements between the donor and acceptor DNA. Other forms of HDR include single-stranded annealing (SSA) and breakage-induced replication, and these require shorter sequence homology relative to HR. Homology-directed repair at nicks (single-stranded breaks) can occur via a mechanism distinct from HDR at double-strand breaks (Davis and Maizels. PNAS (0027-8424), 111 (10), p. E924-E932).

[0291] Alteration of the genome of a prokaryotic and eukaryotic cell or organism cell, for example, through homologous recombination (HR), is a powerful tool for genetic engineering. Homologous recombination has been demonstrated in plants (Halfter et al., (1992) Mol Gen Genet 231:186-93) and insects (Dray and Gloor, 1997, Genetics 147:689-99). Homologous recombination has also been accomplished in other organisms. For example, at least 150-200 bp of homology was required for homologous recombination in the parasitic protozoan Leishmania (Papadopoulou and Dumas, (1997)Nucleic Acids Res 25:4278-86). In the filamentous fungus Aspergillus nidulans, gene replacement has been accomplished with as little as 50 bp flanking homology (Chaveroche et al., (2000)Nucleic Acids Res 28: e97). Targeted gene replacement has also been demonstrated in the ciliate Tetrahymena thermophila (Gaertig et al., (1994) Nucleic Acids Res 22:5391-8). In mammals, homologous recombination has been most successful in the mouse using pluripotent embryonic stem cell lines(ES) that can be grown in culture, transformed, selected and introduced into a mouse embryo (Watson et al., 1992, Recombinant DNA, 2nd Ed., Scientific American Books distributed by WH Freeman & Co.).

### Gene Targeting

[0292] The guide polynucleotide/Cas systems described herein can be used for gene targeting.

[0293] In general, DNA targeting can be performed by cleaving one or both strands at a specific polynucleotide sequence in a cell with a Cas protein associated with a suitable polynucleotide component. Once a single or double-strand break is induced in the DNA, the cell's DNA repair mechanism is activated to repair the break via nonhomologous end-joining (NHEJ) or Homology-Directed Repair (HDR) processes which can lead to modifications at the target site.

[0294] The length of the DNA sequence at the target site can vary, and includes, for example, target sites that are at least 12, 13, 14, 15, 16, 17, 18, 19, 20, 21, 22, 23, 24, 25, 26, 27, 28, 29, 30, or more than 30 nucleotides in length. It is further possible that the target site can be palindromic, that is, the sequence on one strand reads the same in the opposite direction on the complementary strand. The nick/cleavage site can be within the target sequence or the nick/cleavage site could be outside of the target sequence. In another variation, the cleavage could occur at nucleotide positions immediately opposite each other to produce a blunt end cut or, in other cases, the incisions could be staggered to produce single-stranded overhangs, also called “sticky ends” or “staggered end”, which can be either 5′ overhangs, or 3′ overhangs. Active variants of genomic target sites can also be used. Such active variants can comprise at least 65%, 70%, 75%, 80%, 85%, 90%, 91%, 92%, 93%, 94%, 95%, 96%, 97%, 98%, 99% or more sequence identity to the given target site, wherein the active variants retain biological activity and hence are capable of being recognized and cleaved by a Cas endonuclease.

[0295] Assays to measure the single or double-strand break of a target site by an endonuclease are known in the art and generally measure the overall activity and specificity of the agent on DNA substrates comprising recognition sites.

[0296] A targeting method herein can be performed in such a way that two or more DNA target sites are targeted in the method, for example. Such a method can optionally be characterized as a multiplex method. Two, three, four, five, six, seven, eight, nine, ten, or more target sites can be targeted at the same time in certain embodiments. A multiplex method is typically performed by a targeting method herein in which multiple different RNA components are provided, each designed to guide a guide polynucleotide/Cas endonuclease complex to a unique DNA target site.

### Gene Editing

[0297] The process for editing a genomic sequence combining DSB and modification templates generally comprises: introducing into a host cell a DSB-inducing agent, or a nucleic acid encoding a DSB-inducing agent, that recognizes a target sequence in the chromosomal sequence and is able to induce a DSB in the genomic sequence, and at least one polynucleotide modification template comprising at least one nucleotide alteration when compared to the nucleotide sequence to be edited. The polynucleotide modification template can further comprise nucleotide sequences flanking the at least one nucleotide alteration, in which the flanking sequences are substantially homologous to the chromosomal region flanking the DSB. Genome editing using DSB-inducing agents, such as Cas-gRNA complexes, has been described, for example in US20150082478 published on 19 Mar. 2015, WO2015026886 published on 26 Feb. 2015, WO2016007347 published 14 Jan. 2016, and WO/2016/025131 published on 18 Feb. 2016.

[0298] Some uses for guide RNA/Cas endonuclease systems have been described (see for example: US20150082478 A1 published 19 Mar. 2015, WO2015026886 published 26 Feb. 2015, and US20150059010 published 26 Feb. 2015) and include but are not limited to modifying or replacing nucleotide sequences of interest (such as a regulatory elements), insertion of polynucleotides of interest, gene knock-out, gene-knock in, modification of splicing sites and/or introducing alternate splicing sites, modifications of nucleotide sequences encoding a protein of interest, amino acid and/or protein fusions, and gene silencing by expressing an inverted repeat into a gene of interest.

[0299] Proteins may be altered in various ways including amino acid substitutions, deletions, truncations, and insertions. Methods for such manipulations are generally known. For example, amino acid sequence variants of the protein(s) can be prepared by mutations in the DNA. Methods for mutagenesis and nucleotide sequence alterations include, for example, Kunkel, (1985) Proc. Natl. Acad. Sci. USA 82:488-92; Kunkel et al., (1987) Meth Enzymol 154:367-82; U.S. Pat. No. 4,873,192; Walker and Gaastra, eds. (1983) Techniques in Molecular Biology (MacMillan Publishing Company, New York) and the references cited therein. Guidance regarding amino acid substitutions not likely to affect biological activity of the protein is found, for example, in the model of Dayhoff et al., (1978) Atlas of Protein Sequence and Structure (Natl Biomed Res Found, Washington, D.C.). Conservative substitutions, such as exchanging one amino acid with another having similar properties, may be preferable. Conservative deletions, insertions, and amino acid substitutions are not expected to produce radical changes in the characteristics of the protein, and the effect of any substitution, deletion, insertion, or combination thereof can be evaluated by routine screening assays. Assays for double-strand-break-inducing activity are known and generally measure the overall activity and specificity of the agent on DNA substrates comprising target sites.

[0300] Described herein are methods for genome editing with CRISPR Associated (Cas) endonucleases. Following characterization of the guide RNA (or guide polynucleotide) and PAM sequence, a ribonucleoprotein (RNP) complex comprising the Cas endonuclease and the guide RNA (or guide polynucleotide) may be utilized to modify a target polynucleotide, including but not limited to: synthetic DNA, isolated genomic DNA, or chromosomal DNA in other organisms, including plants. To facilitate optimal expression and nuclear localization (for eukaryotic cells), the gene comprising the Cas endonuclease may be optimized, and then delivered into cells as DNA expression cassettes by methods known in the art. The components necessary to comprise an active RNP may also be delivered as RNA with or without modifications that protect the RNA from degradation or as mRNA capped or uncapped (Zhang, Y. et al., 2016, Nat. Commun. 7:12617) or Cas protein guide polynucleotide complexes (WO2017070032 published 27 Apr. 2017), or any combination thereof. Additionally, a part or part(s) of the complex may be expressed from a DNA construct while other components are delivered as RNA with or without modifications that protect the RNA from degradation or as mRNA capped or uncapped (Zhang et al. 2016 Nat. Commun. 7:12617) or Cas protein guide polynucleotide complexes (WO2017070032 published 27 Apr. 2017) or any combination thereof. To produce crRNAs in-vivo, tRNA derived elements may also be used to recruit endogenous RNAses to cleave crRNA transcripts into mature forms capable of guiding the complex to its DNA target site, as described, for example, in WO2017105991 published 22 Jun. 2017. Furthermore, the cleavage activity of the Cas endonuclease may be deactivated by altering key catalytic residues in its cleavage domain (Sinkunas, T. et al., 2013, EMBO J. 32:385-394) resulting in a RNA guided helicase that may be used to enhance homology directed repair, induce transcriptional activation, or remodel local DNA structures. Moreover, the activity of the Cas cleavage and helicase domains may both be knocked-out and used in combination with other DNA cutting, DNA nicking, DNA binding, transcriptional activation, transcriptional repression, DNA remodeling, DNA deamination, DNA unwinding, DNA recombination enhancing, DNA integration, DNA inversion, and DNA repair agents.

[0301] The transcriptional direction of the tracrRNA for the CRISPR-Cas system (if present) and other components of the CRISPR-Cas system (such as variable targeting domain, crRNA repeat, loop, anti-repeat) can be deduced as described in WO2016186946 published 24 Nov. 2016, and WO2016186953 published 24 Nov. 2016.

[0302] As described herein, once the appropriate guide RNA requirement is established, the PAM preferences for each new system disclosed herein may be examined. If the cleavage RNP complex (comprising the Cas endonuclease and guide polynucleotide) results in degradation of the randomized PAM library, the complex can be converted into a nickase by disabling activity either through mutagenesis of critical residues or by assembling the reaction in the absence of ATP as described previously (Sinkunas, T. et al., 2013, EMBO J. 32:385-394). Two regions of PAM randomization separated by two protospacer targets may be utilized to generate a double-stranded DNA break which may be captured and sequenced to examine the PAM sequences that support cleavage by the complex.

[0303] In one embodiment, the invention describes a method for modifying a target site in the genome of a cell, the method comprising introducing into a cell at least one PGEN described herein, and identifying at least one cell that has a modification at said target, wherein the modification at said target site is selected from the group consisting of (i) a replacement of at least one nucleotide, (ii) a deletion of at least one nucleotide, (iii) an insertion of at least one nucleotide, and (iv) any combination of (i)-(iii).

[0304] The nucleotide to be edited can be located within or outside a target site recognized and cleaved by a Cas endonuclease. In one embodiment, the at least one nucleotide modification is not a modification at a target site recognized and cleaved by a Cas endonuclease. In another embodiment, there are at least 1, 2, 3, 4, 5, 6, 7, 8, 9, 10, 11, 12, 13, 14, 15, 16, 17, 18, 19, 20, 21, 22, 23, 24, 25, 26, 27, 30, 40, 50, 100, 200, 300, 400, 500, 600, 700, 900 or 1000 nucleotides between the at least one nucleotide to be edited and the genomic target site.

[0305] A knock-out may be produced by an indel (insertion or deletion of nucleotide bases in a target DNA sequence through NHEJ), or by specific removal of sequence that reduces or completely destroys the function of sequence at or near the targeting site.

[0306] A guide polynucleotide/Cas endonuclease induced targeted mutation can occur in a nucleotide sequence that is located within or outside a genomic target site that is recognized and cleaved by the Cas endonuclease.

[0307] The method for editing a nucleotide sequence in the genome of a cell can be a method without the use of an exogenous selectable marker by restoring function to a non-functional gene product.

[0308] In one embodiment, the invention describes a method for modifying a target site in the genome of a cell, the method comprising introducing into a cell at least one PGEN described herein and at least one donor DNA, wherein said donor DNA comprises a polynucleotide of interest, and optionally, further comprising identifying at least one cell that said polynucleotide of interest integrated in or near said target site.

[0309] In one aspect, the methods disclosed herein may employ homologous recombination (HR) to provide integration of the polynucleotide of interest at the target site.

[0310] Various methods and compositions can be employed to produce a cell or organism having a polynucleotide of interest inserted in a target site via activity of a CRISPR-Cas system component described herein. In one method described herein, a polynucleotide of interest is introduced into the organism cell via a donor DNA construct. As used herein, “donor DNA” is a DNA construct that comprises a polynucleotide of interest to be inserted into the target site of a Cas endonuclease. The donor DNA construct further comprises a first and a second region of homology that flank the polynucleotide of interest. The first and second regions of homology of the donor DNA share homology to a first and a second genomic region, respectively, present in or flanking the target site of the cell or organism genome.

[0311] The donor DNA can be tethered to the guide polynucleotide. Tethered donor DNAs can allow for co-localizing target and donor DNA, useful in genome editing, gene insertion, and targeted genome regulation, and can also be useful in targeting post-mitotic cells where function of endogenous HR machinery is expected to be highly diminished (Mali et al., 2013, Nature Methods Vol. 10:957-963).

[0312] The amount of homology or sequence identity shared by a target and a donor polynucleotide can vary and includes total lengths and/or regions having unit integral values in the ranges of about 1-20 bp, 20-50 bp, 50-100 bp, 75-150 bp, 100-250 bp, 150-300 bp, 200-400 bp, 250-500 bp, 300-600 bp, 350-750 bp, 400-800 bp, 450-900 bp, 500-1000 bp, 600-1250 bp, 700-1500 bp, 800-1750 bp, 900-2000 bp, 1-2.5 kb, 1.5-3 kb, 2-4 kb, 2.5-5 kb, 3-6 kb, 3.5-7 kb, 4-8 kb, 5-10 kb, or up to and including the total length of the target site. These ranges include every integer within the range, for example, the range of 1-20 bp includes 1, 2, 3, 4, 5, 6, 7, 8, 9, 10, 11, 12, 13, 14, 15, 16, 17, 18, 19 and 20 bps. The amount of homology can also be described by percent sequence identity over the full aligned length of the two polynucleotides which includes percent sequence identity of about at least 50%, 55%, 60%, 65%, 70%, 71%, 72%, 73%, 74%, 75%, 76%, 77%, 78%, 79%, 80%, 81%, 82%, 83%, 84%, 85%, 86%, 87%, 88%, 89%, 90%, 91%, 92%, 93%, 94%, 95%, 96%, 97%, 98%, 99% or 100%. Sufficient homology includes any combination of polynucleotide length, global percent sequence identity, and optionally conserved regions of contiguous nucleotides or local percent sequence identity, for example sufficient homology can be described as a region of 75-150 bp having at least 80% sequence identity to a region of the target locus. Sufficient homology can also be described by the predicted ability of two polynucleotides to specifically hybridize under high stringency conditions, see, for example, Sambrook et al., (1989) Molecular Cloning: A Laboratory Manual, (Cold Spring Harbor Laboratory Press, NY); Current Protocols in Molecular Biology, Ausubel et al., Eds (1994) Current Protocols, (Greene Publishing Associates, Inc. and John Wiley & Sons, Inc.); and, Tijssen (1993) Laboratory Techniques in Biochemistry and Molecular Biology—Hybridization with Nucleic Acid Probes, (Elsevier, New York).

[0313] Episomal DNA molecules can also be ligated into the double-strand break, for example, integration of T-DNAs into chromosomal double-strand breaks (Chilton and Que, (2003) Plant Physiol 133:956-65; Salomon and Puchta, (1998) EMBO J. 17:6086-95). Once the sequence around the double-strand breaks is altered, for example, by exonuclease activities involved in the maturation of double-strand breaks, gene conversion pathways can restore the original structure if a homologous sequence is available, such as a homologous chromosome in non-dividing somatic cells, or a sister chromatid after DNA replication (Molinier et al., (2004) Plant Cell 16:342-52). Ectopic and/or epigenic DNA sequences may also serve as a DNA repair template for homologous recombination (Puchta, (1999) Genetics 152:1173-81).

[0314] In one embodiment, the disclosure comprises a method for editing a nucleotide sequence in the genome of a cell, the method comprising introducing into at least one PGEN described herein, and a polynucleotide modification template, wherein said polynucleotide modification template comprises at least one nucleotide modification of said nucleotide sequence, and optionally further comprising selecting at least one cell that comprises the edited nucleotide sequence.

[0315] The guide polynucleotide/Cas endonuclease system can be used in combination with at least one polynucleotide modification template to allow for editing (modification) of a genomic nucleotide sequence of interest. (See also US20150082478, published 19 Mar. 2015 and WO2015026886 published 26 Feb. 2015).

[0316] Polynucleotides of interest and/or traits can be stacked together in a complex trait locus as described in WO2012129373 published 27 Sep. 2012, and in WO2013112686, published 1 Aug. 2013. The guide polynucleotide/Cas endonuclease system described herein provides for an efficient system to generate double-strand breaks and allows for traits to be stacked in a complex trait locus.

[0317] A guide polynucleotide/Cas system as described herein, mediating gene targeting, can be used in methods for directing heterologous gene insertion and/or for producing complex trait loci comprising multiple heterologous genes in a fashion similar as disclosed in WO2012129373 published 27 Sep. 2012, where instead of using a double-strand break inducing agent to introduce a gene of interest, a guide polynucleotide/Cas system as disclosed herein is used. By inserting independent transgenes within 0.1, 0.2, 0.3, 0.4, 0.5, 1.0, 2, or even 5 centimorgans (cM) from each other, the transgenes can be bred as a single genetic locus (see, for example, US20130263324 published 3 Oct. 2013 or WO2012129373 published 14 Mar. 2013). After selecting a plant comprising a transgene, plants comprising (at least) one transgenes can be crossed to form an F1 that comprises both transgenes. In progeny from these F1 (F2 or BC1) 1/500 progeny would have the two different transgenes recombined onto the same chromosome. The complex locus can then be bred as single genetic locus with both transgene traits. This process can be repeated to stack as many traits as desired.

[0318] Further uses for guide RNA/Cas endonuclease systems have been described (See for example: US20150082478 published 19 Mar. 2015, WO2015026886 published 26 Feb. 2015, US20150059010 published 26 Feb. 2015, WO2016007347 published 14 Jan. 2016, and PCT application WO2016025131 published 18 Feb. 2016) and include but are not limited to modifying or replacing nucleotide sequences of interest (such as a regulatory elements), insertion of polynucleotides of interest, gene knock-out, gene-knock in, modification of splicing sites and/or introducing alternate splicing sites, modifications of nucleotide sequences encoding a protein of interest, amino acid and/or protein fusions, and gene silencing by expressing an inverted repeat into a gene of interest.

[0319] Resulting characteristics from the gene editing compositions and methods described herein may be evaluated. Chromosomal intervals that correlate with a phenotype or trait of interest can be identified. A variety of methods well known in the art are available for identifying chromosomal intervals. The boundaries of such chromosomal intervals are drawn to encompass markers that will be linked to the gene controlling the trait of interest. In other words, the chromosomal interval is drawn such that any marker that lies within that interval (including the terminal markers that define the boundaries of the interval) can be used as a marker for a particular trait. In one embodiment, the chromosomal interval comprises at least one QTL, and furthermore, may indeed comprise more than one QTL. Close proximity of multiple QTLs in the same interval may obfuscate the correlation of a particular marker with a particular QTL, as one marker may demonstrate linkage to more than one QTL. Conversely, e.g., if two markers in close proximity show co-segregation with the desired phenotypic trait, it is sometimes unclear if each of those markers identifies the same QTL or two different QTL. The term “quantitative trait locus” or “QTL” refers to a region of DNA that is associated with the differential expression of a quantitative phenotypic trait in at least one genetic background, e.g., in at least one breeding population. The region of the QTL encompasses or is closely linked to the gene or genes that affect the trait in question. An “allele of a QTL” can comprise multiple genes or other genetic factors within a contiguous genomic region or linkage group, such as a haplotype. An allele of a QTL can denote a haplotype within a specified window wherein said window is a contiguous genomic region that can be defined, and tracked, with a set of one or more polymorphic markers. A haplotype can be defined by the unique fingerprint of alleles at each marker within the specified window.

[0320] In addition to the double-strand break inducing agents, site-specific base conversions can also be achieved to engineer one or more nucleotide changes to create one or more edits into the genome. These include for example, a site-specific base edit mediated by an C·G to T·A or an A·T to G·C base editing deaminase enzymes (Gaudelli et al., Programmable base editing of A·T to G·C in genomic DNA without DNA cleavage.” Nature (2017); Nishida et al. “Targeted nucleotide editing using hybrid prokaryotic and vertebrate adaptive immune systems.” Science 353 (6305) (2016); Komor et al. “Programmable editing of a target base in genomic DNA without double-stranded DNA cleavage.” Nature 533 (7603) (2016): 420-4. A catalytically “dead” or inactive Cas9 (dCas9), for example a catalytically inactive “dead” version of a Cas9 ortholog disclosed herein, fused to a cytidine deaminase or an adenine deaminase protein becomes a specific base editor that can alter DNA bases without inducing a DNA break. Base editors convert C->T (or G->A on the opposite strand) or an adenine base editor that would convert adenine to inosine, resulting in an A->G change within an editing window specified by the gRNA.

Introduction of CRISPR-Cas System Components into a Cell

[0321] The methods and compositions described herein do not depend on a particular method for introducing a sequence into an organism or cell, only that the polynucleotide or polypeptide gains access to the interior of at least one cell of the organism. Introducing includes reference to the incorporation of a nucleic acid into a eukaryotic or prokaryotic cell where the nucleic acid may be incorporated into the genome of the cell, and includes reference to the transient (direct) provision of a nucleic acid, protein or polynucleotide-protein complex (PGEN, RGEN) to the cell.

[0322] Methods for introducing polynucleotides or polypeptides or a polynucleotide-protein complex into cells or organisms are known in the art including, but not limited to, microinjection, electroporation, stable transformation methods, transient transformation methods, ballistic particle acceleration (particle bombardment), whiskers mediated transformation, Agrobacterium-mediated transformation, direct gene transfer, viral-mediated introduction, transfection, transduction, cell-penetrating peptides, mesoporous silica nanoparticle (MSN)-mediated direct protein delivery, topical applications, sexual crossing, sexual breeding, and any combination thereof.

[0323] For example, the guide polynucleotide (guide RNA, crNucleotide+tracrNucleotide, guide DNA and/or guide RNA-DNA molecule) can be introduced into a cell directly (transiently) as a single stranded or double stranded polynucleotide molecule. The guide RNA (or crRNA+tracrRNA) can also be introduced into a cell indirectly by introducing a recombinant DNA molecule comprising a heterologous nucleic acid fragment encoding the guide RNA (or crRNA+tracrRNA), operably linked to a specific promoter that is capable of transcribing the guide RNA (crRNA+tracrRNA molecules) in said cell. The specific promoter can be, but is not limited to, a RNA polymerase III promoter, which allow for transcription of RNA with precisely defined, unmodified, 5′- and 3′-ends (Ma et al., 2014, Mol. Ther. Nucleic Acids 3: e161; DiCarlo et al., 2013, Nucleic Acids Res. 41:4336-4343; WO2015026887, published 26 Feb. 2015). Any promoter capable of transcribing the guide RNA in a cell can be used and includes a heat shock/heat inducible promoter operably linked to a nucleotide sequence encoding the guide RNA.

[0324] The Cas endonuclease, such as the Cas endonuclease described herein, can be introduced into a cell by directly introducing the Cas polypeptide itself (referred to as direct delivery of Cas endonuclease), the mRNA encoding the Cas protein, and/or the guide polynucleotide/Cas endonuclease complex itself, using any method known in the art. The Cas endonuclease can also be introduced into a cell indirectly by introducing a recombinant DNA molecule that encodes the Cas endonuclease. The endonuclease can be introduced into a cell transiently or can be incorporated into the genome of the host cell using any method known in the art. Uptake of the endonuclease and/or the guided polynucleotide into the cell can be facilitated with a Cell Penetrating Peptide (CPP) as described in WO2016073433 published 12 May 2016. Any promoter capable of expressing the Cas endonuclease in a cell can be used and includes a heat shock/heat inducible promoter operably linked to a nucleotide sequence encoding the Cas endonuclease.

[0325] Direct delivery of a polynucleotide modification template into plant cells can be achieved through particle mediated delivery, and any other direct method of delivery, such as but not limiting to, polyethylene glycol (PEG)-mediated transfection to protoplasts, whiskers mediated transformation, electroporation, particle bombardment, cell-penetrating peptides, or mesoporous silica nanoparticle (MSN)-mediated direct protein delivery can be successfully used for delivering a polynucleotide modification template in eukaryotic cells, such as plant cells.

[0326] The donor DNA can be introduced by any means known in the art. The donor DNA may be provided by any transformation method known in the art including, for example, Agrobacterium-mediated transformation or biolistic particle bombardment. The donor DNA may be present transiently in the cell or it could be introduced via a viral replicon. In the presence of the Cas endonuclease and the target site, the donor DNA is inserted into the transformed plant's genome.

[0327] Direct delivery of any one of the guided Cas system components can be accompanied by direct delivery (co-delivery) of other mRNAs that can promote the enrichment and/or visualization of cells receiving the guide polynucleotide/Cas endonuclease complex components. For example, direct co-delivery of the guide polynucleotide/Cas endonuclease components (and/or guide polynucleotide/Cas endonuclease complex itself) together with mRNA encoding phenotypic markers (such as but not limiting to transcriptional activators such as CRC (Bruce et al. 2000 The Plant Cell 12:65-79) can enable the selection and enrichment of cells without the use of an exogenous selectable marker by restoring function to a non-functional gene product as described in WO2017070032 published 27 Apr. 2017.

[0328] Introducing a guide RNA/Cas endonuclease complex described herein, into a cell includes introducing the individual components of said complex either separately or combined into the cell, and either directly (direct delivery as RNA for the guide and protein for the Cas endonuclease and Cas protein subunits, or functional fragments thereof) or via recombination constructs expressing the components (guide RNA, Cas endonuclease, Cas protein subunits, or functional fragments thereof). Introducing a guide RNA/Cas endonuclease complex (RGEN) into a cell includes introducing the guide RNA/Cas endonuclease complex as a ribonucleotide-protein into the cell. The ribonucleotide-protein can be assembled prior to being introduced into the cell as described herein. The components comprising the guide RNA/Cas endonuclease ribonucleotide protein (at least one Cas endonuclease, at least one guide RNA, at least one Cas protein subunits) can be assembled in vitro or assembled by any means known in the art prior to being introduced into a cell (targeted for genome modification as described herein).

[0329] Plant cells differ from human and animal cells in that plant cells comprise a plant cell wall which may act as a barrier to the direct delivery of the RGEN ribonucleoproteins and/or of the direct delivery of the RGEN components.

[0330] Direct delivery of the RGEN ribonucleoproteins into plant cells can be achieved through particle mediated delivery (particle bombardment. Based on the experiments described herein, a skilled artesian can now envision that any other direct method of delivery, such as but not limiting to, polyethylene glycol (PEG)-mediated transfection to protoplasts, electroporation, cell-penetrating peptides, or mesoporous silica nanoparticle (MSN)-mediated direct protein delivery, can be successfully used for delivering RGEN ribonucleoproteins into plant cells.

[0331] Direct delivery of the RGEN ribonucleoprotein, allows for genome editing at a target site in the genome of a cell which can be followed by rapid degradation of the complex, and only a transient presence of the complex in the cell. This transient presence of the RGEN complex may lead to reduced off-target effects. In contrast, delivery of RGEN components (guide RNA, Cas endonuclease) via plasmid DNA sequences can result in constant expression of RGENs from these plasmids which can intensify off target effects (Cradick, T. J. et al. (2013) Nucleic Acids Res 41:9584-9592; Fu, Y et al. (2014)Nat. Biotechnol. 31:822-826).

[0332] Direct delivery can be achieved by combining any one component of the guide RNA/Cas endonuclease complex (RGEN) (such as at least one guide RNA, at least one Cas protein, and at least one Cas protein), with a particle delivery matrix comprising a microparticle (such as but not limited to of a gold particle, tungsten particle, and silicon carbide whisker particle) (see also WO2017070032 published 27 Apr. 2017).

[0333] In one aspect, the guide polynucleotide/Cas endonuclease complex is a complex wherein the guide RNA and Cas endonuclease protein forming the guide RNA/Cas endonuclease complex are introduced into the cell as RNA and protein, respectively.

[0334] In one aspect, the guide polynucleotide/Cas endonuclease complex is a complex wherein the guide RNA and Cas endonuclease protein and the at least one protein subunit of a Cas protein forming the guide RNA/Cas endonuclease complex are introduced into the cell as RNA and proteins, respectively.

[0335] In one aspect, the guide polynucleotide/Cas endonuclease complex is a complex wherein the guide RNA and Cas endonuclease protein and the at least one protein subunit of a Cascade forming the guide RNA/Cas endonuclease complex (cleavage ready cascade) are preassembled in vitro and introduced into the cell as a ribonucleotide-protein complex.

[0336] Protocols for introducing polynucleotides, polypeptides or polynucleotide-protein complexes (PGEN, RGEN) into eukaryotic cells, such as plants or plant cells are known and include microinjection (Crossway et al., (1986) Biotechniques 4:320-34 and U.S. Pat. No. 6,300,543), meristem transformation (U.S. Pat. No. 5,736,369), electroporation (Riggs et al., (1986) Proc. Natl. Acad. Sci. USA 83:5602-6, Agrobacterium-mediated transformation (U.S. Pat. Nos. 5,563,055 and 5,981,840), whiskers mediated transformation (Ainley et al. 2013, Plant Biotechnology Journal 11:1126-1134; Shaheen A. and M. Arshad 2011 Properties and Applications of Silicon Carbide (2011), 345-358 Editor(s): Gerhardt, Rosario. Publisher: InTech, Rijeka, Croatia. CODEN: 69PQBP; ISBN: 978-953-307-201-2), direct gene transfer (Paszkowski et al., (1984) EMBO J 3:2717-22), and ballistic particle acceleration (U.S. Pat. Nos. 4,945,050; 5,879,918; 5,886,244; 5,932,782; Tomes et al., (1995) “Direct DNA Transfer into Intact Plant Cells via Microprojectile Bombardment” in Plant Cell, Tissue, and Organ Culture: Fundamental Methods, ed. Gamborg & Phillips (Springer-Verlag, Berlin); McCabe et al., (1988) Biotechnology 6:923-6; Weissinger et al., (1988) Ann Rev Genet 22:421-77; Sanford et al., (1987) Particulate Science and Technology 5:27-37 (onion); Christou et al., (1988) Plant Physiol 87:671-4 (soybean); Finer and McMullen, (1991) In vitro Cell Dev Biol 27P: 175-82 (soybean); Singh et al., (1998) Theor Appl Genet 96:319-24 (soybean); Datta et al., (1990) Biotechnology 8:736-40 (rice); Klein et al., (1988) Proc. Natl. Acad. Sci. USA 85:4305-9 (maize); Klein et al., (1988) Biotechnology 6:559-63 (maize); U.S. Pat. Nos. 5,240,855; 5,322,783 and 5,324,646; Klein et al., (1988) Plant Physiol 91:440-4 (maize); Fromm et al., (1990) Biotechnology 8:833-9 (maize); Hooykaas-Van Slogteren et al., (1984) Nature 311:763-4; U.S. Pat. No. 5,736,369 (cereals); Bytebier et al., (1987) Proc. Natl. Acad. Sci. USA 84:5345-9 (Liliaceae); De Wet et al., (1985) in The Experimental Manipulation of Ovule Tissues, ed. Chapman et al., (Longman, New York), pp. 197-209 (pollen); Kaeppler et al., (1990) Plant Cell Rep 9:415-8) and Kaeppler et al., (1992) Theor Appl Genet 84:560-6 (whisker-mediated transformation); D'Halluin et al., (1992) Plant Cell 4:1495-505 (electroporation); Li et al., (1993) Plant Cell Rep 12:250-5; Christou and Ford (1995) Annals Botany 75:407-13 (rice) and Osjoda et al., (1996)Nat Biotechnol 14:745-50 (maize via Agrobacterium tumefaciens).

[0337] Alternatively, polynucleotides may be introduced into plant or plant cells by contacting cells or organisms with a virus or viral nucleic acids. Generally, such methods involve incorporating a polynucleotide within a viral DNA or RNA molecule. In some examples a polypeptide of interest may be initially synthesized as part of a viral polyprotein, which is later processed by proteolysis in vivo or in vitro to produce the desired recombinant protein. Methods for introducing polynucleotides into plants and expressing a protein encoded therein, involving viral DNA or RNA molecules, are known, see, for example, U.S. Pat. Nos. 5,889,191, 5,889,190, 5,866,785, 5,589,367 and 5,316,931.

[0338] The polynucleotide or recombinant DNA construct can be provided to or introduced into a prokaryotic and eukaryotic cell or organism using a variety of transient transformation methods. Such transient transformation methods include, but are not limited to, the introduction of the polynucleotide construct directly into the plant.

[0339] Nucleic acids and proteins can be provided to a cell by any method including methods using molecules to facilitate the uptake of anyone or all components of a guided Cas system (protein and/or nucleic acids), such as cell-penetrating peptides and nanocarriers. See also US20110035836 published 10 Feb. 2011, and EP2821486A1 published 7 Jan. 2015.

[0340] Other methods of introducing polynucleotides into a prokaryotic and eukaryotic cell or organism or plant part can be used, including plastid transformation methods, and the methods for introducing polynucleotides into tissues from seedlings or mature seeds.

[0341] Stable transformation is intended to mean that the nucleotide construct introduced into an organism integrates into a genome of the organism and is capable of being inherited by the progeny thereof. Transient transformation is intended to mean that a polynucleotide is introduced into the organism and does not integrate into a genome of the organism or a polypeptide is introduced into an organism. Transient transformation indicates that the introduced composition is only temporarily expressed or present in the organism.

[0342] A variety of methods are available to identify those cells having an altered genome at or near a target site without using a screenable marker phenotype. Such methods can be viewed as directly analyzing a target sequence to detect any change in the target sequence, including but not limited to PCR methods, sequencing methods, nuclease digestion, Southern blots, and any combination thereof.

[0343] The presently disclosed polynucleotides and polypeptides can be introduced into a cell. Cells include, but are not limited to, human, non-human, animal, mammalian, bacterial, protist, fungal, insect, yeast, non-conventional yeast, and plant cells, as well as plants and seeds produced by the methods described herein. In some aspects, the cell of the organism is a reproductive cell, a somatic cell, a meiotic cell, a mitotic cell, a stem cell, or a pluripotent stem cell.

### Cells and Plants

[0344] The presently disclosed polynucleotides and polypeptides can be introduced into a plant cell. Plant cells include, well as plants and seeds produced by the methods described herein. Any plant can be used with the compositions and methods described herein, including monocot and dicot plants, and plant elements.

[0345] The novel Cas9 orthologs disclosed may be used to edit the genome of a plant cell in various ways. In one aspect, it may be desirable to delete one or more nucleotides. In another aspect, it may be desirable to insert one or more nucleotides. In one aspect, it may be desirable to replace one or more nucleotides. In another aspect, it may be desirable to modify one or more nucleotides via a covalent or non-covalent interaction with another atom or molecule. In some aspects, the cell is diploid. In some aspects, the cell is haploid.

[0346] Genome modification via a Cas9 ortholog may be used to effect a genotypic and/or phenotypic change on the target organism. Such a change is preferably related to an improved trait of interest or an agronomically-important characteristic, the correction of an endogenous defect, or the expression of some type of expression marker. In some aspects, the trait of interest or agronomically-important characteristic is related to the overall health, fitness, or fertility of the plant, the yield of a plant product, the ecological fitness of the plant, or the environmental stability of the plant. In some aspects, the trait of interest or agronomically-important characteristic is selected from the group consisting of: agronomics, herbicide resistance, insecticide resistance, disease resistance, nematode resistance, microbial resistance, fungal resistance, viral resistance, fertility or sterility, grain characteristics, commercial product production. In some aspects, the trait of interest or agronomically-important characteristic is selected from the group consisting of: disease resistance, drought tolerance, heat tolerance, cold tolerance, salinity tolerance, metal tolerance, herbicide tolerance, improved water use efficiency, improved nitrogen utilization, improved nitrogen fixation, pest resistance, herbivore resistance, pathogen resistance, yield improvement, health enhancement, vigor improvement, growth improvement, photosynthetic capability improvement, nutrition enhancement, altered protein content, altered starch content, altered carbohydrate content, altered sugar content, altered fiber content, altered oil content, increased biomass, increased shoot length, increased root length, improved root architecture, modulation of a metabolite, modulation of the proteome, increased seed weight, altered seed carbohydrate composition, altered seed oil composition, altered seed protein composition, altered seed nutrient composition, as compared to an isoline plant not comprising a modification derived from the methods or compositions herein.

[0347] Examples of monocot plants that can be used include, but are not limited to, corn (Zea mays), rice (Oryza sativa), rye (Secale cereale), sorghum (Sorghum bicolor, Sorghum vulgare), millet (e.g., pearl millet (Pennisetum glaucum), proso millet (Panicum miliaceum), foxtail millet (Setaria italica), finger millet (Eleusine coracana)), wheat (Triticum species, for example Triticum aestivum, Triticum monococcum), sugarcane (Saccharum spp.), oats (Avena), barley (Hordeum), switchgrass (Panicum virgatum), pineapple (Ananas comosus), banana (Musa spp.), palm, ornamentals, turfgrasses, and other grasses.

[0348] Examples of dicot plants that can be used include, but are not limited to, soybean (Glycine max), Brassica species (for example but not limited to: oilseed rape or Canola) (Brassica napus, B. campestris, Brassica rapa, Brassica juncea), alfalfa (Medicago sativa), tobacco (Nicotiana tabacum), Arabidopsis (Arabidopsis thaliana), sunflower (Helianthus annuus), cotton (Gossypium arboreum, Gossypium barbadense), and peanut (Arachis hypogaea), tomato (Solanum lycopersicum), potato (Solanum tuberosum).

[0349] Additional plants that can be used include safflower (Carthamus tinctorius), sweet potato (Ipomoea batatus), cassava (Manihot esculenta), coffee (Coffea spp.), coconut (Cocos nucifera), citrus trees (Citrus spp.), cocoa (Theobroma cacao), tea (Camellia sinensis), banana (Musa spp.), avocado (Persea americana), fig (Ficus casica), guava (Psidium guajava), mango (Mangifera indica), olive (Olea europaea), papaya (Carica papaya), cashew (Anacardium occidentale), macadamia (Macadamia integrifolia), almond (Prunus amygdalus), sugar beets (Beta vulgaris), vegetables, ornamentals, and conifers.

[0350] Vegetables that can be used include tomatoes (Lycopersicon esculentum), lettuce (e.g., Lactuca sativa), green beans (Phaseolus vulgaris), lima beans (Phaseolus limensis), peas (Lathyrus spp.), and members of the genus Cucumis such as cucumber (C. sativus), cantaloupe (C. cantalupensis), and musk melon (C. melo). Ornamentals include azalea (Rhododendron spp.), hydrangea (Macrophylla hydrangea), hibiscus (Hibiscus rosasanensis), roses (Rosa spp.), tulips (Tulipa spp.), daffodils (Narcissus spp.), petunias (Petunia hybrida), carnation (Dianthus caryophyllus), poinsettia (Euphorbia pulcherrima), and chrysanthemum.

[0351] Conifers that may be used include pines such as loblolly pine (Pinus taeda), slash pine (Pinus elliotii), ponderosa pine (Pinus ponderosa), lodgepole pine (Pinus contorta), and Monterey pine (Pinus radiata); Douglas fir (Pseudotsuga menziesii); Western hemlock (Tsuga canadensis); Sitka spruce (Picea glauca); redwood (Sequoia sempervirens); true firs such as silver fir (Abies amabilis) and balsam fir (Abies balsamea); and cedars such as Western red cedar (Thuja plicata) and Alaska yellow cedar (Chamaecyparis nootkatensis).

[0352] In certain embodiments of the disclosure, a fertile plant is a plant that produces viable male and female gametes and is self-fertile. Such a self-fertile plant can produce a progeny plant without the contribution from any other plant of a gamete and the genetic material comprised therein. Other embodiments of the disclosure can involve the use of a plant that is not self-fertile because the plant does not produce male gametes, or female gametes, or both, that are viable or otherwise capable of fertilization.

[0353] The present disclosure finds use in the breeding of plants comprising one or more introduced traits, or edited genomes.

[0354] A non-limiting example of how two traits can be stacked into the genome at a genetic distance of, for example, 5 cM from each other is described as follows: A first plant comprising a first transgenic target site integrated into a first DSB target site within the genomic window and not having the first genomic locus of interest is crossed to a second transgenic plant, comprising a genomic locus of interest at a different genomic insertion site within the genomic window and the second plant does not comprise the first transgenic target site. About 5% of the plant progeny from this cross will have both the first transgenic target site integrated into a first DSB target site and the first genomic locus of interest integrated at different genomic insertion sites within the genomic window. Progeny plants having both sites in the defined genomic window can be further crossed with a third transgenic plant comprising a second transgenic target site integrated into a second DSB target site and/or a second genomic locus of interest within the defined genomic window and lacking the first transgenic target site and the first genomic locus of interest. Progeny are then selected having the first transgenic target site, the first genomic locus of interest and the second genomic locus of interest integrated at different genomic insertion sites within the genomic window. Such methods can be used to produce a transgenic plant comprising a complex trait locus having at least 1, 2, 3, 4, 5, 6, 7, 8, 9, 10, 11, 12, 13, 14, 15, 16, 17, 19, 19, 20, 21, 22, 23, 24, 25, 26, 27, 28, 29, 30, 31 or more transgenic target sites integrated into DSB target sites and/or genomic loci of interest integrated at different sites within the genomic window. In such a manner, various complex trait loci can be generated.

### Cells and Animals

[0355] The presently disclosed polynucleotides and polypeptides can be introduced into an animal cell. Animal cells can include, but are not limited to: an organism of a phylum including chordates, arthropods, mollusks, annelids, cnidarians, or echinoderms; or an organism of a class including mammals, insects, birds, amphibians, reptiles, or fishes. In some aspects, the animal is human, mouse, C. elegans, rat, fruit fly (Drosophila spp.), zebrafish, chicken, dog, cat, guinea pig, hamster, chicken, Japanese ricefish, sea lamprey, pufferfish, tree frog (e.g., Xenopus spp.), monkey, or chimpanzee. Particular cell types that are contemplated include haploid cells, diploid cells, reproductive cells, neurons, muscle cells, endocrine or exocrine cells, epithelial cells, muscle cells, tumor cells, embryonic cells, hematopoietic cells, bone cells, germ cells, somatic cells, stem cells, pluripotent stem cells, induced pluripotent stem cells, progenitor cells, meiotic cells, and mitotic cells. In some aspects, a plurality of cells from an organism may be used.

[0356] The novel Cas9 orthologs disclosed may be used to edit the genome of an animal cell in various ways. In one aspect, it may be desirable to delete one or more nucleotides. In another aspect, it may be desirable to insert one or more nucleotides. In one aspect, it may be desirable to replace one or more nucleotides. In another aspect, it may be desirable to modify one or more nucleotides via a covalent or non-covalent interaction with another atom or molecule.

[0357] Genome modification via a Cas9 ortholog may be used to effect a genotypic and/or phenotypic change on the target organism. Such a change is preferably related to an improved phenotype of interest or a physiologically-important characteristic, the correction of an endogenous defect, or the expression of some type of expression marker. In some aspects, the phenotype of interest or physiologically-important characteristic is related to the overall health, fitness, or fertility of the animal, the ecological fitness of the animal, or the relationship or interaction of the animal with other organisms in its environment. In some aspects, the phenotype of interest or physiologically-important characteristic is selected from the group consisting of: improved general health, disease reversal, disease modification, disease stabilization, disease prevention, treatment of parasitic infections, treatment of viral infections, treatment of retroviral infections, treatment of bacterial infections, treatment of neurological disorders (for example but not limited to: multiple sclerosis), correction of endogenous genetic defects (for example but not limited to: metabolic disorders, Achondroplasia, Alpha-1 Antitrypsin Deficiency, Antiphospholipid Syndrome, Autism, Autosomal Dominant Polycystic Kidney Disease, Barth syndrome, Breast cancer, Charcot-Marie-Tooth, Colon cancer, Cri du chat, Crohn's Disease, Cystic fibrosis, Dercum Disease, Down Syndrome, Duane Syndrome, Duchenne Muscular Dystrophy, Factor V Leiden Thrombophilia, Familial Hypercholesterolemia, Familial Mediterranean Fever, Fragile X Syndrome, Gaucher Disease, Hemochromatosis, Hemophilia, Holoprosencephaly, Huntington's disease, Klinefelter syndrome, Marfan syndrome, Myotonic Dystrophy, Neurofibromatosis, Noonan Syndrome, Osteogenesis Imperfecta, Parkinson's disease, Phenylketonuria, Poland Anomaly, Porphyria, Progeria, Prostate Cancer, Retinitis Pigmentosa, Severe Combined Immunodeficiency (SCID), Sickle cell disease, Skin Cancer, Spinal Muscular Atrophy, Tay-Sachs, Thalassemia, Trimethylaminuria, Turner Syndrome, Velocardiofacial Syndrome, WAGR Syndrome, and Wilson Disease), treatment of innate immune disorders (for example but not limited to: immunoglobulin subclass deficiencies), treatment of acquired immune disorders (for example but not limited to: AIDS and other HIV-related disorders), treatment of cancer, as well as treatment of diseases, including rare or “orphan” conditions, that have eluded effective treatment options with other methods.

[0358] Cells that have been genetically modified using the compositions or methods disclosed herein may be transplanted to a subject for purposes such as gene therapy, e.g. to treat a disease, or as an antiviral, antipathogenic, or anticancer therapeutic, for the production of genetically modified organisms in agriculture, or for biological research.

In vitro Polynucleotide Detection, Binding, and Modification

[0359] The compositions disclosed herein may further be used as compositions for use in in vitro methods, in some aspects with isolated polynucleotide sequence(s). Said isolated polynucleotide sequence(s) may comprise one or more target sequence(s) for modification. In some aspects, said isolated polynucleotide sequence(s) may be genomic DNA, a PCR product, or a synthesized oligonucleotide.

### Compositions

[0360] Modification of a target sequence may be in the form of a nucleotide insertion, a nucleotide deletion, a nucleotide substitution, the addition of an atom molecule to an existing nucleotide, a nucleotide modification, or the binding of a heterologous polynucleotide or polypeptide to said target sequence. The insertion of one or more nucleotides may be accomplished by the inclusion of a donor polynucleotide in the reaction mixture: said donor polynucleotide is inserted into a double-strand break created by said Cas9 ortholog polypeptide. The insertion may be via non-homologous end joining or via homologous recombination.

[0361] In one aspect, the sequence of the target polynucleotide is known prior to modification, and compared to the sequence(s) of polynucleotide(s) that result from treatment with the Cas9 ortholog. In one aspect, the sequence of the target polynucleotide is not known prior to modification, and the treatment with the Cas9 ortholog is used as part of a method to determine the sequence of said target polynucleotide.

[0362] Polynucleotide modification with a Cas9 ortholog may be accomplished by usage of a full-length polypeptide identified from a Cas locus, or from a fragment, modification, or variant of a polypeptide identified from a Cas locus. In some aspects, said Cas9 ortholog is obtained or derived from an organism listed in Table 1. In some aspects, said Cas9 ortholog is a polypeptide sharing at least 80% identity with any of SEQID NOs: 86-170 or 511-1135. In some aspects, said Cas9 ortholog is a functional variant of any of SEQID NOs: 86-170 or 511-1135. In some aspects, said Cas9 ortholog is a functional fragment of any of SEQID NOs: 86-170 or 511-1135. In some aspects, said Cas9 ortholog is a Cas9 polypeptide encoded by a polynucleotide selected from the group consisting of: SEQID NO: 86-170 or 511-1135. In some aspects, said Cas9 ortholog is a Cas9 polypeptide that recognizes a PAM sequence listed in any of Tables 4-83. In some aspects, said Cas9 ortholog is a Cas9 polypeptide identified from an organism listed in the sequence listing.

[0363] In some aspects, the Cas9 ortholog is provided as a cas9 polynucleotide. In some aspects, said cas9 polynucleotide is selected from the group consisting of: SEQID NO: 1-85, or a sequence sharing at least 80%, 85%, 90%, 95%, 97%, 99%, or 100% with any one of SEQID NO: 1-85.

[0364] In some aspects, the Cas9 ortholog may be selected from the group consisting of: an unmodified wild type Cas9 ortholog, a functional Cas9 ortholog variant, a functional Cas9 ortholog fragment, a fusion protein comprising an active or deactivated Cas9 ortholog, a Cas9 ortholog further comprising one or more nuclear localization sequences (NLS) on the C-terminus or on the N-terminus or on both the N- and C-termini, a biotinylated Cas9 ortholog, a Cas9 ortholog nickase, a Cas9 ortholog endonuclease, a Cas9 ortholog further comprising a Histidine tag, and a mixture of any two or more of the preceding.

[0365] In some aspects, the Cas9 ortholog is a fusion protein further comprising a nuclease domain, a transcriptional activator domain, a transcriptional repressor domain, an epigenetic modification domain, a cleavage domain, a nuclear localization signal, a cell-penetrating domain, a translocation domain, a marker, or a transgene that is heterologous to the target polynucleotide sequence or to the cell from which said target polynucleotide sequence is obtained or derived.

[0366] In some aspects, a plurality of Cas9 orthologs may be desired. In some aspects, said plurality may comprise Cas9 orthologs derived from different source organisms or from different loci within the same organism. In some aspects, said plurality may comprise Cas9 orthologs with different binding specificities to the target polynucleotide. In some aspects, said plurality may comprise Cas9 orthologs with different cleavage efficiencies. In some aspects, said plurality may comprise Cas9 orthologs with different PAM specificities. In some aspects, said plurality may comprise orthologs of different molecular compositions, i.e., a polynucleotide cas9 ortholog and a polypeptide Cas9 ortholog.

[0367] The guide polynucleotide may be provided as a single guide RNA (sgRNA), a chimeric molecule comprising a tracrRNA, a chimeric molecule comprising a crRNA, a chimeric RNA-DNA molecule, a DNA molecule, or a polynucleotide comprising one or more chemically modified nucleotides.

[0368] The storage conditions of the Cas9 ortholog and/or the guide polynucleotide include parameters for temperature, state of matter, and time. In some aspects, the Cas9 ortholog and/or the guide polynucleotide is stored at about-80 degrees Celsius, at about-20 degrees Celsius, at about 4 degrees Celsius, at about 20-25 degrees Celsius, or at about 37 degrees Celsius. In some aspects, the Cas9 ortholog and/or the guide polynucleotide is stored as a liquid, a frozen liquid, or as a lyophilized powder. In some aspects, the Cas9 ortholog and/or the guide polynucleotide is stable for at least one day, at least one week, at least one month, at least one year, or even greater than one year.

[0369] Any or all of the possible polynucleotide components of the reaction (e.g., guide polynucleotide, donor polynucleotide, optionally a cas9 polynucleotide) may be provided as part of a vector, a construct, a linearized or circularized plasmid, or as part of a chimeric molecule. Each component may be provided to the reaction mixture separately or together. In some aspects, one or more of the polynucleotide components are operably linked to a heterologous noncoding regulatory element that regulates its expression.

[0370] The method for modification of a target polynucleotide comprises combining the minimal elements into a reaction mixture comprising: a Cas9 ortholog (or variant, fragment, or other related molecule as described above), a guide polynucleotide comprising a sequence that is substantially complementary to, or selectively hybridizes to, the target polynucleotide sequence of the target polynucleotide, and a target polynucleotide for modification. In some aspects, the Cas9 ortholog is provided as a polypeptide. In some aspects, the Cas9 ortholog is provided as a cas9 ortholog polynucleotide. In some aspects, the guide polynucleotide is provided as an RNA molecule, a DNA molecule, an RNA: DNA hybrid, or a polynucleotide molecule comprising a chemically-modified nucleotide.

[0371] The storage buffer of any one of the components, or the reaction mixture, may be optimized for stability, efficacy, or other parameters. Additional components of the storage buffer or the reaction mixture may include a buffer composition, Tris, EDTA, dithiothreitol (DTT), phosphate-buffered saline (PBS), sodium chloride, magnesium chloride, HEPES, glycerol, BSA, a salt, an emulsifier, a detergent, a chelating agent, a redox reagent, an antibody, nuclease-free water, a proteinase, and/or a viscosity agent. In some aspects, the storage buffer or reaction mixture further comprises a buffer solution with at least one of the following components: HEPES, MgCl2, NaCl, EDTA, a proteinase, Proteinase K, glycerol, nuclease-free water.

[0372] Incubation conditions will vary according to desired outcome. The temperature is preferably at least 10 degrees Celsius, between 10 and 15, at least 15, between 15 and 17, at least 17, between 17 and 20, at least 20, between 20 and 22, at least 22, between 22 and 25, at least 25, between 25 and 27, at least 27, between 27 and 30, at least 30, between 30 and 32, at least 32, between 32 and 35, at least 35, at least 36, at least 37, at least 38, at least 39, at least 40, or even greater than 40 degrees Celsius. The time of incubation is at least 1 minute, at least 2 minutes, at least 3 minutes, at least 4 minutes, at least 5 minutes, at least 6 minutes, at least 7 minutes, at least 8 minutes, at least 9 minutes, at least 10 minutes, or even greater than 10 minutes.

[0373] The sequence(s) of the polynucleotide(s) in the reaction mixture prior to, during, or after incubation may be determined by any method known in the art. In one aspect, modification of a target polynucleotide may be ascertained by comparing the sequence(s) of the polynucleotide(s) purified from the reaction mixture to the sequence of the target polynucleotide prior to combining with the Cas9 ortholog.

[0374] Any one or more of the compositions disclosed herein, useful for in vitro or in vivo polynucleotide detection, binding, and/or modification, may be comprised within a kit. A kit comprises a Cas9 ortholog or a polynucleotide cas9 ortholog encoding such, optionally further comprising buffer components to enable efficient storage, and one or more additional compositions that enable the introduction of said Cas9 ortholog or cas9 ortholog to a heterologous polynucleotide, wherein said Cas9 ortholog or cas9 ortholog is capable of effecting a modification, addition, deletion, or substitution of at least one nucleotide of said heterologous polynucleotide. In an additional aspect, a Cas9 ortholog disclosed herein may be used for the enrichment of one or more polynucleotide target sequences from a mixed pool. In an additional aspect, a Cas9 ortholog disclosed herein may be immobilized on a matrix for use in in vitro target polynucleotide detection, binding, and/or modification.

### Methods of Detection

[0375] Methods of detecting the Cas9: guide polynucleotide complex bound to the target polynucleotide may include any known in the art, including but not limited to microscopy, chromatographic separation, electrophoresis, immunoprecipitation, filtration, nanopore separation, microarrays, as well as those described below.

[0376] A DNA Electrophoretic Mobility Shift Assay (EMSA): studies proteins binding to known DNA oligonucleotide probes and assesses the specificity of the interaction. The technique is based on the principle that protein-DNA complexes migrate more slowly than free DNA molecules when subjected to polyacrylamide or agarose gel electrophoresis. Because the rate of DNA migration is retarded upon protein binding, the assay is also called a gel retardation assay. Adding a protein-specific antibody to the binding components creates an even larger complex (antibody-protein-DNA) which migrates even slower during electrophoresis, this is known as a supershift and can be used to confirm protein identities.

[0377] DNA Pull-down Assays use a DNA probe labelled with a high affinity tag, such as biotin, which allows the probe to be recovered or immobilized. A DNA probe can be complexed with a protein from a cell lysate in a reaction similar to that used in the EMSA and then used to purify the complex using agarose or magnetic beads. The proteins are then eluted from the DNA and detected by Western blot or identified by mass spectrometry. Alternatively, the protein may be labelled with an affinity tag or the DNA-protein complex may be isolated using an antibody against the protein of interest (similar to a supershift assay). In this case, the unknown DNA sequence bound by the protein is detected by Southern blotting or through PCR analysis.

[0378] Reporter assays provide a real-time in vivo read-out of translational activity for a promoter of interest. Reporter genes are fusions of a target promoter DNA sequence and a reporter gene DNA sequence which is customized by the researcher and the DNA sequence codes for a protein with detectable properties like firefly/Renilla luciferase or alkaline phosphatase. These genes produce enzymes only when the promoter of interest is activated. The enzyme, in turn, catalyses a substrate to produce either light or a colour change that can be detected by spectroscopic instrumentation. The signal from the reporter gene is used as an indirect determinant for the translation of endogenous proteins driven from the same promoter.

[0379] Microplate Capture and Detection Assays use immobilized DNA probes to capture specific protein-DNA interactions and confirm protein identities and relative amounts with target specific antibodies. Typically, a DNA probe is immobilized on the surface of 96- or 384-well microplates coated with streptavidin. A cellular extract is prepared and added to allow the binding protein to bind to the oligonucleotide. The extract is then removed and each well is washed several times to remove non-specifically bound proteins. Finally, the protein is detected using a specific antibody labelled for detection. This method can be extremely sensitive, detecting less than 0.2 pg of the target protein per well. This method may also be utilized for oligonucleotides labelled with other tags, such as primary amines that can be immobilized on microplates coated with an amine-reactive surface chemistry.

[0380] DNA Footprinting is one of the most widely used methods for obtaining detailed information on the individual nucleotides in protein-DNA complexes, even inside living cells. In such an experiment, chemicals or enzymes are used to modify or digest the DNA molecules. When sequence specific proteins bind to DNA they can protect the binding sites from modification or digestion. This can subsequently be visualized by denaturing gel electrophoresis, where unprotected DNA is cleaved more or less at random. Therefore it appears as a ‘ladder’ of bands and the sites protected by proteins have no corresponding bands and look like foot prints in the pattern of bands. The foot prints there by identify specific nucleosides at the protein-DNA binding sites.

[0381] Microscopic techniques include optical, fluorescence, electron, and atomic force microscopy (AFM).

[0382] Chromatin immunoprecipitation analysis (ChIP) causes proteins to bind covalently to their DNA targets, after which they are unlinked and characterized separately.

[0383] Systematic Evolution of Ligands by EXponential enrichment (SELEX) exposes target proteins to a random library of oligonucleotides. Those genes that bind are separated and amplified by PCR.

### Non-Limiting Aspects

[0384] Aspect 1: A synthetic composition comprising a cas9 polynucleotide selected from the group consisting of: (a) a polynucleotide sharing at least 80% identity with any of: SEQID NOS: 86-170 or 511-1135, (b) a functional variant of any of SEQID NOS: 86-170 or 511-1135, (c) a functional fragment of any of SEQID NOS: 86-170 or 511-1135, (d) a cas9 gene encoding a Cas9 polypeptide selected from the group consisting of: SEQID NO: 86-170, (e) a cas9 gene encoding a Cas9 polypeptide that recognizes a PAM sequence listed in any of Tables 4-83, and (f) a cas9 gene identified from an organism listed in Table 1; and a heterologous component.
[0385] Aspect 2: A synthetic composition comprising a Cas9 polypeptide selected from the group consisting of: (a) a polypeptide sharing at least 80% identity with any of: SEQID NO: 86-170 or 511-1135, (b) a functional variant of any of SEQID NO: 86-170 or 511-1135, (c) a functional fragment of any of SEQID NO: 86-170, (d) a Cas9 polypeptide encoded by a polynucleotide selected from the group consisting of: SEQID NOS: 86-170 or 511-1135, (e) a Cas9 polypeptide that recognizes a PAM sequence listed in any of Tables 4-83, and (f) a Cas9 polypeptide identified from an organism listed in Table 1 or in the sequence listing; and a heterologous component.
[0386] Aspect 3: A deactivated Cas9 polypeptide wherein said deactivated Cas9 polypeptide is capable of binding to a target polynucleotide but lacks at least one domain responsible for nucleotide cleavage.
[0387] Aspect 4: A synthetic fusion protein comprising a Cas9 polypeptide and a heterologous polypeptide, wherein said Cas9 polypeptide is selected from the group consisting of:
[0388] Aspect 5: A synthetic composition comprising a single guide RNA selected from the group consisting of: (a) a polynucleotide sharing at least 80% identity with any of: SEQID NO: 426-510, (b) a functional variant of any of: SEQID NO: 426-510, (c) a functional fragment of any of: SEQID NO: 426-510, and (d) a single guide RNA molecule identified or derived from an organism listed in Table 1; and a heterologous component.
[0389] Aspect 6: A synthetic composition comprising a tracrRNA selected from the group consisting of: (a) a polynucleotide sharing at least 80% identity with any of: SEQID NO: 341-425, (b) a functional variant of any of: SEQID NO: 341-425, (c) a functional fragment of any of: SEQID NO: 341-425, and (d) a tracrRNA molecule identified from an organism listed in Table 1; and a heterologous component.
[0390] Aspect 7: A synthetic composition comprising a crRNA repeat sequence selected from the group consisting of: (a) a polynucleotide sharing at least 80% identity with any of: SEQID NO: 171-255, (b) a functional variant of any of: SEQID NO: 171-255, (c) a functional fragment of any of: SEQID NO: 171-255, and (d) a crRNA repeat sequence molecule identified from an organism listed in Table 1; and a heterologous component.
[0391] Aspect 8: A synthetic composition comprising an anti-repeat sequence selected from the group consisting of: (a) a polynucleotide sharing at least 80% identity with any of: SEQID NO: 256-340, (b) a functional variant of any of: SEQID NO: 256-340, (c) a functional fragment of any of: SEQID NO: 256-340, and (d) an anti-repeat sequence molecule identified from an organism listed in Table 1; and a heterologous component.
[0392] Aspect 9: A synthetic composition comprising a polypeptide sharing at least 80% identity with a polypeptide selected from the group consisting of SEQID NO: 86-170 and a polynucleotide selected from the group consisting of: (a) a polynucleotide sharing at least 80% identity with a polynucleotide selected from the group consisting of SEQID NO: 171-255, (b) a polynucleotide sharing at least 80% identity with a polynucleotide selected from the group consisting of SEQID NO: 341-425, and (c) a polynucleotide sharing at least 80% identity with a polynucleotide selected from the group consisting of SEQID NO: 426-510; wherein said synthetic composition further comprises a heterologous component.
[0393] Aspect 10: A synthetic composition comprising a guide polynucleotide and Cas9 ortholog, wherein said Cas9 ortholog is selected from the group consisting of: (a) the deactivated Cas9 polypeptide of Aspect 3, (b) a polypeptide sharing at least 80% identity with any of: SEQID NO: 86-170 or 511-1135, (c) a functional variant of any of SEQID NO: 86-170 or 511-1135, (d) a functional fragment of any of SEQID NO: 86-170 or 511-1135, (e) a Cas9 polypeptide that recognizes a PAM sequence listed in any of Tables 4-83, (f) a Cas9 polypeptide identified from an organism listed in Table 1, (g) a cas9 polynucleotide selected from the group consisting of: SEQID NOS: 86-170 or 511-1135, and (h) a cas9 polynucleotide encoding any of the polypeptides of (a) through (f); and said guide polynucleotide is selected from the group consisting of: (i) a single guide RNA sharing at least 80% identity with a sequence selected from the group consisting of SEQ ID NOs: 426-510, (j) a single guide RNA comprising a functional fragment of SEQ ID NOs: 426-510, (k) a single guide RNA comprising a functional variant of SEQ ID NOs: 426-510, (1) a single guide RNA comprising a chimeric non-naturally occurring crRNA linked to a tracrRNA, wherein said tracrRNA comprises a nucleotide sequence selected from the group consisting of SEQ ID NOs: 341-425, a functional fragment of SEQ ID NOs: 341-425, and a functional variant of SEQ ID NOs: 341-425, (m) a single guide RNA comprises a chimeric non-naturally occurring crRNA linked to a tracrRNA, wherein said chimeric non-naturally occurring crRNA comprises a nucleotide sequence selected from the group consisting of SEQ ID NOs: 171-255, a functional fragment of SEQ ID NOs: 171-255, and a functional variant of SEQ ID NOs: 171-255, (n) a guide RNA that is a duplex molecule comprising a chimeric non-naturally occurring crRNA and a tracrRNA, wherein said chimeric non-naturally occurring crRNA comprises a variable targeting domain capable of hybridizing to said target sequence, wherein said tracrRNA comprises a nucleotide sequence selected from the group consisting of SEQ ID NOs: 341-425, a functional fragment of SEQ ID NOs: 341-425, and a functional variant of SEQ ID NOs: 341-425, wherein said chimeric non-naturally occurring crRNA comprises a variable targeting domain capable of hybridizing to said target sequence, (o) a guide RNA that is a duplex molecule comprising a chimeric non-naturally occurring crRNA and a tracrRNA, wherein said chimeric non-naturally occurring crRNA comprises a nucleotide sequence selected from the group consisting of SEQ ID NOs: 171-255, a functional fragment of SEQ ID NOs: 171-255, and a functional variant of SEQ ID NOs: 171-255, wherein said chimeric non-naturally occurring crRNA comprises a variable targeting domain capable of hybridizing to said target sequence, (p) a polynucleotide comprising both DNA and RNA, (q) a polynucleotide comprising at least one chemically-modified nucleotide, and (r) a DNA molecule encoding any of the RNA molecules of (h) through (n); wherein said guide polynucleotide and said Cas 9 ortholog are capable of forming a complex that is capable of recognizing, binding to, and optionally nicking or cleaving a target polynucleotide sequence; further comprising at least one heterologous component.
[0394] Aspect 11: The guide polynucleotide/Cas9 endonuclease complex of Aspect 10, wherein said target polynucleotide sequence is located in the genome of a cell.
[0395] Aspect 12: The guide polynucleotide/Cas9 endonuclease complex of Aspect 10, wherein said target polynucleotide sequence is isolated from a genomic environment.
[0396] Aspect 13: The guide polynucleotide/Cas9 endonuclease complex of Aspect 10, wherein said target polynucleotide sequence is synthetic.
[0397] Aspect 14: The synthetic composition of any of Aspects 1-10, wherein said heterologous component is selected from the group consisting of: a heterologous polynucleotide, a heterologous polypeptide, a particle, a solid matrix, an antibody, a buffer composition, Tris, EDTA, dithiothreitol (DTT), phosphate-buffered saline (PBS), sodium chloride, magnesium chloride, HEPES, glycerol, bovine serum albumin (BSA), a salt, an emulsifier, a detergent, a chelating agent, a redox reagent, an antibody, nuclease-free water, a viscosity agent, and a Histidine tag.
[0398] Aspect 15: The synthetic composition of Aspect 14, wherein said heterologous polypeptide comprises a nuclease domain, a transcriptional activator domain, a transcriptional repressor domain, an epigenetic modification domain, a cleavage domain, a nuclear localization signal, a cell-penetrating domain, a deaminase domain, a base editing domain, a translocation domain, a marker, and a transgene.
[0399] Aspect 16: The synthetic composition of Aspect 14, wherein said heterologous polynucleotide is selected from the group consisting of: a guide polynucleotide, a chimeric guide polynucleotide, a chemically modified guide polynucleotide, a guide polynucleotide comprising both DNA and RNA, a noncoding expression element, a gene, a marker, and a polynucleotide encoding a plurality of Histidine residues.
[0400] Aspect 17: The synthetic composition of Aspect 14, comprising at least two different said heterologous components.
[0401] Aspect 18: The synthetic composition of Aspect 14, wherein the pH is between 1.0 and 14.0, between 2.0 and 13.0, between 3.0 and 12.0, between 4.0 and 11.0, between 5.0 and 10.0, between 6.0 and 9.0, between 7.0 and 8.0, between 4.5 and 6.5, between 5.5 and 7.5, or between 6.5 and 7.5.
[0402] Aspect 19: The synthetic composition of Aspect 14, wherein said Cas9 ortholog has an activity optimum at a pH between 1.0 and 14.0, between 2.0 and 13.0, between 3.0 and 12.0, between 4.0 and 11.0, between 5.0 and 10.0, between 6.0 and 9.0, between 7.0 and 8.0, between 4.5 and 6.5, between 5.5 and 7.5, or between 6.5 and 7.5.
[0403] Aspect 20: The synthetic composition of Aspect 14, wherein said Cas9 ortholog has an activity optimum at a temperature between 0 degrees Celsius and 100 degrees Celsius, between at least 0 degrees Celsius and 10 degrees Celsius, between at least 10 degrees Celsius and 20 degrees Celsius, between at least 20 degrees Celsius and 25 degrees Celsius, between at least 25 degrees Celsius and 30 degrees Celsius, between at least 30 degrees Celsius and 40 degrees Celsius, between at least 40 degrees Celsius and 50 degrees Celsius, between at least 50 degrees Celsius and 60 degrees Celsius, between at least 60 degrees Celsius and 70 degrees Celsius, between at least 70 degrees Celsius and 80 degrees Celsius, between at least 80 degrees Celsius and 90 degrees Celsius, between at least 90 degrees Celsius and 100 degrees Celsius, or 100 degrees Celsius.
[0404] Aspect 21: The synthetic composition of Aspect 14, stored or incubated at a temperature of at least minus 200 degrees Celsius, at least minus 150 degrees Celsius, at least minus 135 degrees Celsius, at least minus 90 degrees Celsius, at least minus 80 degrees Celsius, at least minus 20 degrees Celsius, at least 4 degrees Celsius, at least 17 degrees Celsius, at least 25 degrees Celsius, at least 30 degrees Celsius, at least 35 degrees Celsius, at least 37 degrees Celsius, at least 39 degrees Celsius, or greater than 39 degrees Celsius.
[0405] Aspect 22: A substantially nuclease-free, endotoxin-free composition comprising the synthetic composition of any of Aspects 1-10.
[0406] Aspect 23: A lyophilized composition comprising the synthetic composition of
[0407] Aspect 10 or Aspect 15.
[0408] Aspect 24: A cell comprising the synthetic composition of any of Aspects 1-10.
[0409] Aspect 25: A progeny cell of the cell of Aspect 23, wherein said progeny cell comprises at least one modification of its genome compared to the target polynucleotide site of the parental cell.
[0410] Aspect 26: The cell of Aspect 24, selected from the group consisting of: human, non-human primate, mammal, animal, archaeal, bacterial, protist, fungal, insect, yeast, non-conventional yeast, and plant.
[0411] Aspect 27: The human cell of Aspect 26, wherein said human cell is selected from the group consisting of: haploid cells, diploid cells, reproductive cells, neurons, muscle cells, endocrine or exocrine cells, epithelial cells, muscle cells, tumor cells, embryonic cells, hematopoietic cells, bone cells, germ cells, somatic cells, stem cells, pluripotent stem cells, induced pluripotent stem cells, progenitor cells, meiotic cells, and mitotic cells.
[0412] Aspect 28: The plant cell of Aspect 26, wherein the plant cell is selected from the group consisting of a monocot and dicot cell.
[0413] Aspect 29: The plant cell of Aspect 26, wherein the plant cell is selected from the group consisting of maize, rice, sorghum, rye, barley, wheat, millet, oats, sugarcane, turfgrass, switchgrass, soybean, canola, alfalfa, sunflower, cotton, tobacco, peanut, potato, tobacco, Arabidopsis, vegetable, and safflower cell.
[0414] Aspect 30: The synthetic composition of Aspect 2, wherein said Cas9 endonuclease has been modified to lack at least one nuclease domain.
[0415] Aspect 31: The synthetic composition of Aspect 2, wherein said Cas9 endonuclease has been modified to lack endonuclease activity.
[0416] Aspect 32: A kit comprising the lyophilized composition of Aspect 23 or the synthetic composition of Aspect 22.
[0417] Aspect 33: An in vitro method of detecting a target polynucleotide sequence, comprising: (a) obtaining said target polynucleotide, (b) combining a Cas9 ortholog polypeptide, a guide polynucleotide, and said target polynucleotide in a reaction vessel, (c) incubating the components of step (b) at a temperature of at least 10 degrees Celsius for at least 1 minute, (d) sequencing the resulting polynucleotide(s) in the reaction mixture, and (e) characterizing the sequence of the target polynucleotide of step (a) that was identified by the Cas9 ortholog polypeptide and the guide polynucleotide; wherein said guide polynucleotide comprises a polynucleotide sequence that is substantially complementary to the sequence of the target polynucleotide.
[0418] Aspect 34: An in vitro method of binding a Cas9 ortholog and guide polynucleotide complex to a target polynucleotide, comprising: (a) obtaining the sequence of said target polynucleotide, (b) combining a Cas9 ortholog polypeptide, a guide polynucleotide, and said target polynucleotide in a reaction vessel, (c) incubating the components of step (b) at a temperature of at least 10 degrees Celsius for at least 1 minute; wherein said guide polynucleotide comprises a polynucleotide sequence that is substantially complementary to the target polynucleotide sequence of the target polynucleotide; further comprising detecting the Cas9 ortholog and guide polynucleotide complex bound to the target polynucleotide.
[0419] Aspect 35: The method of Aspect 34, wherein said Cas9 ortholog further comprises a detectable fusion protein domain, a histidine tag, or a chemical marker.
[0420] Aspect 36: The method of Aspect 34, wherein detecting said Cas9 ortholog and guide polynucleotide complex bound to the target polynucleotide further comprises a step comprising an enzyme-linked immunosorbent assay, a radioimmunoassay, affinity chromatography, size exclusion chromatography, ion exchange chromatography, hydrophobic interaction chromatography, electrophoretic mobility shift assay, chromatin immunoprecipitation assay, yeast one-hybrid system, bacterial one-hybrid system, x-ray crystallography, pull-down assay, reporter assay, marker expression assay, microplate capture assay, and DNA footprinting.
[0421] Aspect 37: An in vitro method of modifying a target polynucleotide, comprising: (a) obtaining the sequence of said target polynucleotide, (b) combining a Cas9 ortholog polypeptide, a guide polynucleotide, and said target polynucleotide in a reaction vessel, (c) incubating the components of step (b) at a temperature of at least 10 degrees Celsius for at least 1 minute, (d) sequencing the resulting polynucleotide(s) in the reaction mixture, and (e) identifying at least one sequence modification of said resulting polynucleotide(s) as compared to the sequence of the target polynucleotide obtained in step (a); wherein said guide polynucleotide comprises a polynucleotide sequence that is substantially complementary to the target polynucleotide sequence of the target polynucleotide.
[0422] Aspect 38: The method of any of Aspects 33, 34, or 37, wherein said target polynucleotide was obtained or derived from a host organism prior to the incubation of step (c), and re-introduced back into the same host organism after the incubation of step (c).
[0423] Aspect 39: The method of any of Aspects 33, 34, or 37, wherein said Cas9 ortholog polypeptide is adhered to a solid matrix.
[0424] Aspect 40: The method of any of Aspects 33, 34, or 37, wherein said Cas9 ortholog polypeptide is a nuclease, a nickase, or lacks either nuclease or nickase activity.
[0425] Aspect 41: The method of Aspect 33, wherein said target polynucleotide was obtained or derived from a host organism prior to the incubation of step (c), and introduced into a different organism after the incubation of step (c).
[0426] Aspect 42: The method of Aspect 33, wherein said Cas9 ortholog polypeptide is selected from the group consisting of: an unmodified wild type Cas9 ortholog, a functional Cas9 ortholog variant, a functional Cas9 ortholog fragment, a fusion protein comprising an active or deactivated Cas9 ortholog, a Cas9 ortholog further comprising one or more nuclear localization sequences (NLS) on the C-terminus or on the N-terminus or on both the N- and C-termini, a biotinylated Cas9 ortholog, a Cas9 ortholog nickase, a Cas9 ortholog endonuclease, a Cas9 ortholog further comprising a Histidine tag, a plurality of Cas9 orthologs, and a mixture of any two or more of the preceding.
[0427] Aspect 43: The method of Aspect 33, wherein said Cas9 ortholog polypeptide is selected from the group consisting of: (a) a polypeptide sharing at least 80% identity with any of: SEQID NO: 86-170, (b) a functional variant of any of SEQID NO: 86-170, (c) a functional fragment of any of SEQID NO: 86-170, (d) a Cas9 polypeptide encoded by a polynucleotide selected from the group consisting of: SEQID NOS: 86-170 or 511-1135, (e) a Cas9 polypeptide that recognizes a PAM sequence listed in any of Tables 4-83, and (f) a Cas9 polypeptide identified from an organism listed in Table 1.
[0428] Aspect 44: The method of Aspect 33, further comprising a composition selected from the group consisting of: 200 mM HEPES, 50 mM MgCl2, 1M NaCl, and 1 mM EDTA, a proteinase, Proteinase K, and nuclease-free water.
[0429] Aspect 45: The method of Aspect 33, wherein said modification is selected from the group consisting of: an insertion, a deletion, a substitution, and the addition or association of an atom or molecule to an existing nucleotide.
[0430] Aspect 46: The method of Aspect 33, further comprising a donor polynucleotide, wherein said donor polynucleotide is inserted into a double-strand break created by said Cas9 ortholog polypeptide.
[0431] Aspect 47: An in vivo method of modifying a target polynucleotide sequence, comprising providing to a cell a composition comprising the synthetic composition of any one of Aspects 1-10, wherein said cell comprises in its genome a polynucleotide sequence capable of being recognized, bound to, and cleaved said composition.
[0432] Aspect 48: A method for modifying a target site in the genome of a cell, the method comprising providing to said cell at least one Cas9 ortholog selected from the group consisting of: (a) the deactivated Cas9 polypeptide of Aspect 3, (b) a polypeptide sharing at least 80% identity with any of: SEQID NO: 86-170, (c) a functional variant of any of SEQID NO: 86-170, (d) a functional fragment of any of SEQID NO: 86-170, (e) a Cas9 polypeptide that recognizes a PAM sequence listed in any of Tables 4-83, (f) a Cas9 polypeptide identified from an organism listed in Table 1, (g) a Cas9 polypeptide encoded by a cas9 polynucleotide selected from the group consisting of: SEQID NOS: 86-170 or 511-1135, and (h) a Cas9 polypeptide encoding any of the polypeptides of (a) through (g); and said guide polynucleotide is selected from the group consisting of: (i) a single guide RNA sharing at least 80% identity with a sequence selected from the group consisting of SEQ ID NOs: 426-510, (j) a single guide RNA comprising a functional fragment of SEQ ID NOs: 426-510, (k) a single guide RNA comprising a functional variant of SEQ ID NOs: 426-510, (1) a single guide RNA comprising a chimeric non-naturally occurring crRNA linked to a tracrRNA, wherein said tracrRNA comprises a nucleotide sequence selected from the group consisting of SEQ ID NOs: 341-425, a functional fragment of SEQ ID NOs: 341-425, and a functional variant of SEQ ID NOs: 341-425, (m) a single guide RNA comprises a chimeric non-naturally occurring crRNA linked to a tracrRNA, wherein said chimeric non-naturally occurring crRNA comprises a nucleotide sequence selected from the group consisting of SEQ ID NOs: 171-255, a functional fragment of SEQ ID NOs: 171-255, and a functional variant of SEQ ID NOs: 171-255, (n) a guide RNA that is a duplex molecule comprising a chimeric non-naturally occurring crRNA and a tracrRNA, wherein said chimeric non-naturally occurring crRNA comprises a fragment capable of hybridizing to said target sequence, wherein said tracrRNA comprises a nucleotide sequence selected from the group consisting of: SEQ ID NOs: 341-425, a functional fragment of SEQ ID NOs: 341-425, and a functional variant of SEQ ID NOs: 341-425, (o) a guide RNA that is a duplex molecule comprising a chimeric non-naturally occurring crRNA and a tracrRNA, wherein said chimeric non-naturally occurring crRNA comprises a nucleotide sequence selected from the group consisting of SEQ ID NOs: 171-255, a functional fragment of SEQ ID NOs: 171-255, and a functional variant of SEQ ID NOs: 171-255, wherein said chimeric non-naturally occurring crRNA comprises a variable targeting domain capable of hybridizing to said target sequence, (p) a polynucleotide comprising both DNA and RNA, (q) a polynucleotide comprising at least one chemically-modified nucleotide, and (r) a DNA molecule capable of being transcribed into any of the RNA molecules of (i) through (q); wherein said guide polynucleotide and said Cas9 ortholog are capable of forming a complex that is capable of recognizing, binding to, and optionally nicking or cleaving a target polynucleotide sequence; and identifying at least one cell that has a modification at the target site of said cell, wherein the modification at said target site is selected from the group consisting of (i) a replacement of at least one nucleotide, (ii) a deletion of at least one nucleotide, (iii) an insertion of at least one nucleotide, (iv) modification of at least one nucleotide, and (v) any combination of (i)-(iv).
[0433] Aspect 49: The method of Aspect 48, comprising providing to said cell a plurality of Cas9 polypeptides that each recognize a different PAM sequence listed in any of Tables 4-83.
[0434] Aspect 50: The method of Aspect 48, wherein the concentration of the Cas9 ortholog is provided to said cell at a concentration of less than 100 micromolar.
[0435] Aspect 51: The method of Aspect 48, further comprising providing to said cell a polynucleotide modification template, wherein the polynucleotide modification template comprises at least one nucleotide modification as compared to the target nucleotide sequence of said cell.
[0436] Aspect 52: The method of Aspect 49, wherein said donor DNA comprises a polynucleotide of interest.
[0437] Aspect 53: The method of Aspect 52, further comprising identifying at least one cell that has the polynucleotide of interest integrated in or near the target site.
[0438] Aspect 54: The method of Aspect 52, wherein the polynucleotide of interest confers a benefit to said cell or to the organism that comprises said cell.
[0439] Aspect 55: The method of Aspect 54, wherein the polynucleotide modification or benefit is conferred to a subsequent generation of said cell or said organism that comprises said cell.
[0440] Aspect 56: The method of Aspect 54 or Aspect 55, wherein said benefit is selected from the group consisting of: improved health, improved growth, improved fertility, improved fecundity, improved environmental tolerance, improved vigor, improved disease resistance, improved disease tolerance, improved tolerance to a heterologous molecule, improved fitness, improved physical characteristic, greater mass, increased production of a biochemical molecule, decreased production of a biochemical molecule, upregulation of a gene, downregulation of a gene, upregulation of a biochemical pathway, downregulation of a biochemical pathway, stimulation of cell reproduction, and suppression of cell reproduction.
[0441] Aspect 57: The method of any one of Aspects 51-56, wherein the cell is selected from the group consisting of: a human, non-human primate, mammal, animal, archaeal, bacterial, protist, fungal, insect, yeast, non-conventional yeast, and plant cell.
[0442] Aspect 58: The method of any one of Aspects 51-56, wherein the cell is heterologous to the organism from which the Cas9 ortholog was derived.
[0443] Aspect 59: The method of Aspect 57, wherein the plant cell is selected from the group consisting of a monocot and dicot cell.
[0444] Aspect 60: The method of Aspect 57, wherein the plant cell is selected from the group consisting of maize, rice, sorghum, rye, barley, wheat, millet, oats, sugarcane, turfgrass, switchgrass, soybean, canola, alfalfa, sunflower, cotton, tobacco, peanut, potato, tobacco, Arabidopsis, vegetable, and safflower cell.
[0445] Aspect 61: The method of any one of Aspects 51-56, wherein the cell is a plant cell, and wherein the modification of said target site results in the modulation of a trait of agronomic interest of a plant comprising said cell or a progeny cell thereof, selected from the group consisting of: disease resistance, drought tolerance, heat tolerance, cold tolerance, salinity tolerance, metal tolerance, herbicide tolerance, improved water use efficiency, improved nitrogen utilization, improved nitrogen fixation, pest resistance, herbivore resistance, pathogen resistance, yield improvement, health enhancement, improved fertility, vigor improvement, growth improvement, photosynthetic capability improvement, nutrition enhancement, altered protein content, altered oil content, increased biomass, increased shoot length, increased root length, improved root architecture, modulation of a metabolite, modulation of the proteome, increased seed weight, altered seed carbohydrate composition, altered seed oil composition, altered seed protein composition, altered seed nutrient composition; as compared to an isoline plant not comprising said target site modification or as compared to the plant prior to the modification of said target site in said plant cell.
[0446] Aspect 62: The method of Aspect 57, wherein the human cell is selected from the group consisting of: haploid cells, diploid cells, reproductive cells, neurons, muscle cells, endocrine or exocrine cells, epithelial cells, muscle cells, tumor cells, embryonic cells, hematopoietic cells, bone cells, germ cells, somatic cells, stem cells, pluripotent stem cells, induced pluripotent stem cells, progenitor cells, meiotic cells, and mitotic cells.
[0447] Aspect 63: The method of any one of Aspects 51-56, wherein the cell is an animal cell, and wherein the modification of said target site results in the modulation of a phenotype of physiological interest of an organism comprising said animal cell or a progeny cell thereof, selected from the group consisting of: improved health, improved nutritional status, reduced disease impact, disease stasis, disease reversal, improved fertility, improved vigor, improved mental capacity, improved organism growth, improved weight gain, weight loss, modulation of an endocrine system, modulation of an exocrine system, reduced tumor size, reduced tumor mass, stimulated cell growth, reduced cell growth, production of a metabolite, production of a hormone, production of an immune cell, stimulation of cell production,
[0448] Aspect 64: The method of Aspect 50, wherein said animal cell is a human cell.
[0449] Aspect 65: A plant comprising a modified target site, wherein said plant originates from a plant cell comprising a modified target site produced by the method of any of Aspects 51-56.
[0450] Aspect 66: A plant comprising an edited nucleotide, wherein said plant originates from a plant cell comprising an edited nucleotide produced by the method of Aspect 49.
[0451] Aspect 67: A method of editing a plurality of polynucleotide target sequences, comprising providing to said plurality of polynucleotide target sequences a plurality of Cas9 polypeptides that each recognizes a different PAM sequence listed in any of Tables 4-83.
[0452] Aspect 68: A method of modulating target polynucleotide specificity of a Cas9 ortholog/guide polynucleotide complex as compared to its wild type activity, by changing a parameter selected from the group consisting of: (a) guide polynucleotide length, (b) guide polynucleotide composition, (c) length of PAM sequence, (d) composition of the PAM sequence, and (e) affinity of the Cas9 molecule with the target polynucleotide backbone; and assessing the target polynucleotide specificity of the complex with the changed parameter, and comparing it to the activity of a complex with wild type parameters.
[0453] Aspect 69: A method of optimizing the activity of a Cas9 molecule, comprising introducing at least one nucleotide modification to a sequence selected from the group consisting of SEQID NO: 86-170, and identifying at least one improved characteristic as compared to that of SEQID NO: 86-170.
[0454] Aspect 70: A method of optimizing the activity of a Cas9 molecule by subjecting a parental Cas9 molecule to at least one round of stochastic protein shuffling, and selecting a resultant molecule that has at least one characteristic not present in the parental Cas9 molecule.
[0455] Aspect 71: A method of optimizing the activity of a Cas9 molecule by subjecting a parental Cas9 molecule to at least one round of non-stochastic protein shuffling, and selecting a resultant molecule that has at least one characteristic not present in the parental Cas9 molecule.
[0456] Aspect 72: A synthetic composition comprising a Cas9 ortholog endonuclease and a heterologous polynucleotide that is capable of selective hybridization with a PAM consensus sequence of a target polynucleotide, wherein said PAM consensus sequence has a length of at least 3 nucleotides, at least 4 nucleotides, at least 5 nucleotides, at least 6 nucleotides, at least 7 nucleotides, or greater than 7 nucleotides.
[0457] Aspect 73: A method of effecting a single-strand nick or a double-strand break of a target polynucleotide, wherein said target polynucleotide comprises a PAM consensus sequence that is capable of being recognized by a guide polynucleotide, comprising introducing said guide polynucleotide and a Cas9 ortholog to said target polynucleotide, wherein said single-strand nick or double strand break occurs within said target polynucleotide.
[0458] Aspect 74: A synthetic composition comprising a Cas9 ortholog endonuclease and a heterologous polynucleotide that is capable of selective hybridization with a PAM consensus nucleotide sequence selected from the group consisting of: (a) AAA, (b) AAAA, (c) AAAAA, (d) AAAC, (e) AAAT, (f) AGA, (g) AGRG, (h) AHAC, (i) ANGG, (j) ARHHG, (k) ARNAT, (l) ATAA, (m) ATTTTT, (n) BAVMAR, (o) BGGAT, (p) CAA, (q) CAHGGDD (r) CC, (s) CCA, (t) CCH, (u) CDA, (v) CNA, (w) CNAVGAC, (x) CNG, (y) CT (z) CTA, (aa) CVG, (bb) DGGD (cc) GAAA, (dd) GG, (ee) GGAH, (ff) GGDG, (gg) GGN, (hh) GHAAA, (ii) GNA, (jj) GNAC, (kk) GNAY, (ll) GNG, (mm) GTAMY, (nn) GTGA, (oo) HAR (pp) NDGGD (qq) RNCAC, (rr) RTAA (ss) TC, (tt) TGAR, (uu) TTTTT, (vv) VNCC, (ww) VRACC, (xx) VRNTT, and (yy) VRTTT; wherein A=Adenine, C=Cytosine, G=Guanine, T=Thymine, R=A or G, Y=C or T, S=G or C, W=A or T, K=G or T, M=A or C, B=C or G or T, D=A or G or T, H=A or C or T, V=A or C or G, and N=any base; optionally wherein any nucleotide may flank said PAM consensus nucleotide sequence.
[0459] Aspect 75: A synthetic composition comprising a heterologous component and a Cas endonuclease, wherein the Cas endonuclease comprises at least one amino acid feature selected from the group consisting of: (a) Isoleucine (I) at position 13, (b) Isoleucine (I) at position 21, (c) Leucine (L) at position 71, (d) Leucine (L) at position 149, (e) Serine(S) at position 150, (f) Leucine (L) at position 444, (g) Threonine (T) at position 445, (h) Proline (P) at position 503, (i) F (Phenylalanine) at position 587, (j) A (Alanine) at position 620, (k) L (Leucine) at position 623, (l) T (Threonine) at position 624, (m) I (Isoleucine) at position 632, (n) Q (Glutamine) at position 692, (o) L (Leucine) at position 702, (p) I (Isoleucine) at position 781, (q) K (Lysine) at position 810, (r) L (Leucine) at position 908, (s) V (Valine) at position 931, (t) N/Q (Asparagine or Glutamine) at position 933, (u) K (Lysine) at position 954, (v) V (Valine) at position 955, (w) K (Lysine) at position 1000, (x) V (Valine) at position 1100, (y) Y (Tyrosine) at position 1232, and (z) I (Isoleucine) at position 1236; wherein the position numbers are determined by sequence alignment against SEQID NO: 1125.
[0460] Aspect 76: The synthetic composition of Aspect 1, wherein the Cas endonuclease shares at least 90% identity with a sequence selected from the group consisting of: SEQID NOs: 86-170 and 511-1135.
[0461] Aspect 77: The synthetic composition of Aspect 1, wherein the Cas endonuclease has a total score greater than 3.14, as calculated from the amino acid position scores of Table 86A.
[0462] Aspect 78: The synthetic composition of Aspect 1, wherein the Cas endonuclease has been modified.
[0463] Aspect 79: The synthetic composition of Aspect 4, wherein the Cas endonuclease has been modified to lack endonuclease activity.
[0464] Aspect 80: The synthetic composition of Aspect 4, wherein the Cas endonuclease has been modified to nick a single strand of the target polynucleotide.
[0465] Aspect 81: The synthetic composition of Aspect 4, wherein the Cas endonuclease has been modified to further comprise a heterologous nuclease domain, a transcriptional activator domain, a transcriptional repressor domain, an epigenetic modification domain, a cleavage domain, a nuclear localization signal, a cell-penetrating domain, a deaminase domain, a base editing domain, or a translocation domain.
[0466] Aspect 82: A polynucleotide encoding the polypeptide of Aspect 1.
[0467] Aspect 83: A plasmid comprising the polynucleotide of Aspect 8.
[0468] Aspect 84: The plasmid of Aspect 9, further comprising an expression element operably linked to the polynucleotide encoding the Cas endonuclease.
[0469] Aspect 85: The plasmid of Aspect 9, further comprising a gene encoding a selectable marker or a transgene.
[0470] Aspect 86: The synthetic composition of Aspect 1, wherein the heterologous component is selected from the group consisting of: a heterologous polynucleotide, a heterologous polypeptide, a particle, a solid matrix, an antibody, Tris, EDTA, dithiothreitol (DTT), phosphate-buffered saline (PBS), sodium chloride, magnesium chloride, HEPES, glycerol, bovine serum albumin (BSA), a salt, an emulsifier, a detergent, a chelating agent, a proteinase, Proteinase K, a redox reagent, an antibody, nuclease-free water, a viscosity agent, and a Histidine tag
[0471] Aspect 87: The synthetic composition of Aspect 1, wherein the Cas endonuclease is in a liquid formulation.
[0472] Aspect 88: The synthetic composition of Aspect 1, wherein the Cas endonuclease is in a lyophilized formulation.
[0473] Aspect 89: The synthetic composition of Aspect 1, wherein the Cas endonuclease is in a substantially endotoxin-free formulation.
[0474] Aspect 90: The synthetic composition of Aspect 1, wherein the Cas endonuclease is in a formulation with a pH of between 1.0 and 14.0, between 2.0 and 13.0, between 3.0 and 12.0, between 4.0 and 11.0, between 5.0 and 10.0, between 6.0 and 9.0, between 7.0 and 8.0, between 4.5 and 6.5, between 5.5 and 7.5, or between 6.5 and 7.5.
[0475] Aspect 91: The synthetic composition of Aspect 1, wherein the Cas endonuclease is stored or incubated at a temperature of at least minus 200 degrees Celsius, at least minus 150 degrees Celsius, at least minus 135 degrees Celsius, at least minus 90 degrees Celsius, at least minus 80 degrees Celsius, at least minus 20 degrees Celsius, at least 4 degrees Celsius, at least 17 degrees Celsius, at least 20 degrees Celsius, at least 25 degrees Celsius, at least 30 degrees Celsius, at least 35 degrees Celsius, at least 37 degrees Celsius, at least 39 degrees Celsius, at least 40 degrees Celsius, at least 45 degrees Celsius, at least 50 degrees Celsius, at least 55 degrees Celsius, at least 60 degrees Celsius, at least 65 degrees Celsius, at least 70 degrees Celsius, or greater than 70 degrees Celsius.
[0476] Aspect 92: The synthetic composition of Aspect 1, wherein the Cas endonuclease is attached to a solid matrix.
[0477] Aspect 93: The synthetic composition of Aspect 1, wherein the solid matrix is a particle.
[0478] Aspect 94: A kit comprising the synthetic composition of Aspect 1.
[0479] Aspect 95: The synthetic composition of Aspect 1, further comprising a guide polynucleotide.
[0480] Aspect 96: The synthetic composition of Aspect 1, further comprising a heterologous cell.
[0481] Aspect 97: The synthetic composition of Aspect 22, wherein the cell is obtained from a eukaryotic, prokaryotic, plant, or animal organism.
[0482] Aspect 98: A method of creating a double strand break in a target polynucleotide, the method comprising contacting the target polynucleotide with a guide polynucleotide that shares complementarity with the target nucleotide, and a Cas endonuclease selected from the group consisting of: (a) a polypeptide comprising at least one amino acid feature selected from the group consisting of: (i) Isoleucine (I) at position 13, (ii) Isoleucine (I) at position 21, (iii) Leucine (L) at position 71, (iv) Leucine (L) at position 149, (v) Serine(S) at position 150, (vi) Leucine (L) at position 444, (vii) Threonine (T) at position 445, (viii) Proline (P) at position 503, (ix) F (Phenylalanine) at position 587, (x) A (Alanine) at position 620, (xi) L (Leucine) at position 623, (xii) T (Threonine) at position 624, (xiii) I (Isoleucine) at position 632, (xiv) Q (Glutamine) at position 692, (xv) L (Leucine) at position 702, (xvi) I (Isoleucine) at position 781, (xvii) K (Lysine) at position 810, (xviii) L (Leucine) at position 908, (xix) V (Valine) at position 931, (xx) N/Q (Asparagine or Glutamine) at position 933, (xxi) K (Lysine) at position 954, (xxii) V (Valine) at position 955, (xxiii) K (Lysine) at position 1000, (xxiv) V (Valine) at position 1100, (xxv) Y (Tyrosine) at position 1232, and (xxvi) I (Isoleucine) at position 1236; wherein the position numbers are determined by sequence alignment against SEQID NO: 1125; and (b) a polypeptide comprising a domain at least 90% identical to a sequence selected from the group consisting of: SEQID NOs: 1136-1730; wherein the Cas endonuclease and the guide RNA form a complex that recognizes, binds to, and cleaves the target polynucleotide.
[0483] Aspect 99: The method of Aspect 24, wherein the polypeptide shares at least 90% identity with any of: SEQID NOs: 86-170 and 511-1135.
[0484] Aspect 100: The method of Aspect 24, wherein the double strand break comprises a sticky end overhang.
[0485] Aspect 101: The method of Aspect 25, wherein the Cas endonuclease comprises a polypeptide at least 80% identical to a sequence selected from the group consisting of SEQID NOs: 46, 68, 63, 70, 102, 108, 119, and 131.
[0486] Aspect 102: The method of Aspect 24, wherein the double strand break comprises a blunt end.
[0487] Aspect 103: The method of Aspect 25, wherein the Cas endonuclease comprises a polypeptide at least 80% identical to a sequence selected from the group consisting of SEQ ID NOs: 33, 50, 56, 64, 79, 2, 3, 4, 5, 6, 8, 9, 12, 13, 16, 17, 18, 19, 27, 28, 29, 30, 32, 35, 41, 44, 47, 48, 51, 52, 60, 61, 65, 66, 67, 71, 77, 78, 80, 81, 85, 87, 94, and 97.
[0488] Aspect 104: A method of modifying a DNA target site, the method comprising: (a) contacting a polynucleotide comprising the DNA target site with a Cas endonuclease comprising a polypeptide selected from the group consisting of: (i) a polypeptide comprising at least one amino acid feature selected from the group consisting of: (1) Isoleucine (I) at position 13, (2) Isoleucine (I) at position 21, (3) Leucine (L) at position 71, (4) Leucine (L) at position 149, (5) Serine(S) at position 150, (6) Leucine (L) at position 444, (7) Threonine (T) at position 445, (8) Proline (P) at position 503, (9) F (Phenylalanine) at position 587, (10) A (Alanine) at position 620, (11) L (Leucine) at position 623, (12) T (Threonine) at position 624, (13) I (Isoleucine) at position 632, (14) Q (Glutamine) at position 692, (15) L (Leucine) at position 702, (16) I (Isoleucine) at position 781, (17) K (Lysine) at position 810, (18) L (Leucine) at position 908, (19) V (Valine) at position 931, (20) N/Q (Asparagine or Glutamine) at position 933, (21) K (Lysine) at position 954, (22) V (Valine) at position 955, (23) K (Lysine) at position 1000, (24) V (Valine) at position 1100, (25) Y (Tyrosine) at position 1232, and (26) I (Isoleucine) at position 1236; wherein the position numbers are determined by sequence alignment against SEQID NO: 1125; and (ii) a polypeptide comprising a domain at least 90% identical to a sequence selected from the group consisting of: SEQID NOs: 1136-1730; and (b) a guide polynucleotide that shares complementarity with a sequence in or near the DNA target site, wherein the Cas endonuclease and the guide RNA form a complex that recognizes, binds to, and nicks or cleaves the DNA target site; and (c) detecting at least one modification at the DNA target site.
[0489] Aspect 105: The method of Aspect 30, wherein the Case endonuclease is a polypeptide sharing at least 90% identity with any of: SEQID NOs: 86-170 and 511-1135.
[0490] Aspect 106: The method of Aspect 30, further comprising introducing a donor DNA molecule in step (a), wherein the donor DNA molecule is integrated into the target site.
[0491] Aspect 107: The method of Aspect 30, further comprising introducing a template DNA molecule in step (a), wherein the template DNA molecule directs the repair outcome of the cleavage site.
[0492] Aspect 108: A method of editing at least one base of a target polynucleotide, comprising: (a) contacting the target polynucleotide with: (i) a deaminase, (ii) a Cas endonuclease comprising a polypeptide sharing at least 90% identity with any of: SEQID NOs: 1136-1730, wherein the Cas endonuclease has been modified to lack nuclease activity, and (iii) a guide polynucleotide that shares complementarity with a sequence of the target polynucleotide, wherein the Cas endonuclease and the guide RNA form a complex that recognizes and binds to the target polynucleotide; and (b) detecting at least one modification at the DNA target site.
[0493] Aspect 109: The method of Aspect 34, wherein the Cas endonuclease has been modified to lack endonuclease activity.
[0494] Aspect 110: A method of modifying the genome of a cell, the method comprising:
[0495] (a) introducing into the cell a guide polynucleotide that shares complementarity with a sequence in or near a DNA target site in the cell, and a heterologous Cas endonuclease comprising a polypeptide selected from the group consisting of: (i) a polypeptide comprising at least one amino acid feature selected from the group consisting of: Isoleucine (I) at position 13, Isoleucine (I) at position 21, Leucine (L) at position 71, Leucine (L) at position 149, Serine(S) at position 150, Leucine (L) at position 444, Threonine (T) at position 445, Proline (P) at position 503, F (Phenylalanine) at position 587, A (Alanine) at position 620, L (Leucine) at position 623, T (Threonine) at position 624, I (Isoleucine) at position 632, Q (Glutamine) at position 692, L (Leucine) at position 702, I (Isoleucine) at position 781, K (Lysine) at position 810, L (Leucine) at position 908, V (Valine) at position 931, N/Q (Asparagine or Glutamine) at position 933, K (Lysine) at position 954, V (Valine) at position 955, K (Lysine) at position 1000, V (Valine) at position 1100, Y (Tyrosine) at position 1232, and I (Isoleucine) at position 1236; wherein the position numbers are determined by sequence alignment against SEQID NO: 1125; and (ii) a polypeptide comprising a domain at least 90% identical to a sequence selected from the group consisting of: SEQID NOs: 1136-1730; and wherein the Cas endonuclease and the guide RNA form a complex that recognizes, binds to, and nicks or cleaves the DNA target site; and (b) identifying at least one modification, as compared to an isoline cell not introduced to the Cas endonuclease and guide polynucleotide.
[0496] Aspect 111: The method of Aspect 35, further comprising introducing a heterologous polynucleotide in step (a), wherein the heterologous polynucleotide is a donor DNA or a template DNA.
[0497] Aspect 112: The method of Aspect 35, wherein the cell is removed from a source organism prior to step (a) and re-introduced into either the source organism or introduced into a new organism after step (a).
[0498] Aspect 113: The method of Aspect 35, wherein the cell is placed in a medium that supports growth, and a tissue or organism is regenerated from the cell
[0499] Aspect 114: The method of Aspect 35, wherein the method of modifying the genome of the cell results in a benefit to an organism obtained or derived from the cell.
[0500] Aspect 115: The method of Aspect 35, wherein the cell is selected from the group consisting of: a human, non-human primate, mammal, animal, archaeal, bacterial, protist, fungal, insect, yeast, non-conventional yeast, and plant cell.
[0501] Aspect 116: The method of Aspect 40, wherein the organism is a plant.
[0502] Aspect 117: The method of Aspect 42, wherein the plant is selected from the group consisting of maize, rice, sorghum, rye, barley, wheat, millet, oats, sugarcane, turfgrass, switchgrass, soybean, canola, alfalfa, sunflower, cotton, tobacco, peanut, potato, tobacco, Arabidopsis, vegetable, and safflower.
[0503] Aspect 118: The method of Aspect 42, wherein the benefit is selected from the group consisting of: disease resistance, drought tolerance, heat tolerance, cold tolerance, salinity tolerance, metal tolerance, herbicide tolerance, improved water use efficiency, improved nitrogen utilization, improved nitrogen fixation, pest resistance, herbivore resistance, pathogen resistance, yield improvement, health enhancement, improved fertility, vigor improvement, growth improvement, photosynthetic capability improvement, nutrition enhancement, altered protein content, altered oil content, increased biomass, increased shoot length, increased root length, improved root architecture, modulation of a metabolite, modulation of the proteome, increased seed weight, altered seed carbohydrate composition, altered seed oil composition, altered seed protein composition, altered seed nutrient composition; as compared to an isoline plant not comprising said target site modification or as compared to the plant prior to the modification of said target site in said plant cell.
[0504] Aspect 119: The method of Aspect 40, wherein the organism is an animal.
[0505] Aspect 120: The method of Aspect 45, wherein the animal is a human.
[0506] Aspect 121: The method of Aspect 45, wherein the animal cell is selected from the group consisting of: haploid cells, diploid cells, reproductive cells, neurons, muscle cells, endocrine or exocrine cells, epithelial cells, muscle cells, kidney cells, ovarian cells, tumor cells, embryonic cells, hematopoietic cells, bone cells, germ cells, somatic cells, stem cells, pluripotent stem cells, induced pluripotent stem cells, progenitor cells, meiotic cells, and mitotic cells.
[0507] Aspect 122: The method of Aspect 45, wherein the modification of said target site results in the modulation of a phenotype of physiological interest of an organism comprising said animal cell or a progeny cell thereof, selected from the group consisting of: improved health, improved nutritional status, reduced disease impact, disease stasis, disease reversal, improved fertility, improved vigor, improved mental capacity, improved organism growth, improved weight gain, weight loss, modulation of an endocrine system, modulation of an exocrine system, reduced tumor size, reduced tumor mass, stimulated cell growth, reduced cell growth, production of a metabolite, production of a hormone, production of an immune cell, and stimulation of cell production.
[0508] Aspect 123: A Cas endonuclease that recognizes a PAM selected from the group consisting of: NAR (G>A)WH (A>T>C)GN(C>T>R), N(C>D)V (A>S)R (G>A)TTTN(T>V), NV (A>G>C)TTTTT, NATTTTT, NN(H>G)AAAN(G>A>Y)N, N(T>V)NAAATN, NAV (A>G>C)TCNN, NN(A>S>T)NN(W>G>C)CCN(Y>R), NNAH (T>M)ACN, NGTGANN, NARN(A>K>C)ATN, NV (G>A>C)RNTTN, NN(A>B)RN(A>G>T>C)CCN, NN(A>B)NN (T>V)CCH (A>Y), NNN(H>G)NCDAA, NN(H>G)D(A>K)GGDN(A>B), NNNNCCAG, NNNNCTAA, NNNNCVGANN, N(C>D)NNTCCN, NNNNCTA, NNNNCYAA, NAGRGNY, NNGH (W>C)AAA, NNGAAAN, NNAAAAA, NTGAR (G>A)N(A>Y>G)N(Y>R), N (C>D)H(C>W)GH (Y>A)N(A>B) AN(A>T>S), NNAAACN, NNGTAM (A>C) Y, NH (A>Y) ARNN(C>W>G)N, B (C>K)GGN(A>Y>G)N NN, N(T>C>R)AGAN(A>K>C)NN, NGGN (A>T>G>C)NNN, NGGD(A>T>G)TNN, NGGAN(T>A>C>G)NN, CGGWN (T>R>C)NN, NGGWGNN, N(B>A)GGNN(T>V)NN, NNGD (A>T>G)AY (T>C)N, N (T>V)H(T>C>A)AAAAN, NRTAANN, N(H>G)CAAH (Y>A)N(Y>R)N, NATAAN (A>T>S)N, NV (A>G>C)R (A>G)ACCN, CN(C>W>G)AV (A>S)GAC, NNRNCAC, N(A>B)GGD (W>G)D(G>W)NN, BGD (G>W)GTCN(A>K>C), NAANACN, NRTHAN(A>B)N, BHN(H>G)NGN(T>M)H(Y>A), NMRN(A>Y>G)AH(C>T>A)N, NNNCACN, NARN(T>A>S)ACN, NNNNATW, NGCNGCN, NNNCATN, NAGNGCN, NARN(T>M>G)CCN, NATCCTN, NRTAAN(T>A>S)N, N(C>T>G>A)AAD (A>G>T)CNN, NAAAGNN, NNGACNN, N(T>V)NTAAD (A>T>G)N, NNGAD (G>W)NN, NGGN(W>S)NNN, N(T>V)GGD(W>G)GNN, NGGD(A>T>G)N(T>M>G)NN, NNAAAGN, N(G>H)GGDN(T>M>G)NN, NNAGAAA, NN(T>M>G)AAAAA, N(C>D)N(C>W>G)GW(T>C)D(A>G>T)AA, NAAAAYN, NRGNNNN, NATGN(H>G)TN, NNDATTT, and NATARCN(C>T>A>G).
[0509] Aspect 124: A synthetic composition comprising a heterologous component and a Cas endonuclease, wherein the Cas endonuclease comprises at least one amino acid feature selected from the group consisting of: (a) Isoleucine (I) at position 13, (b) Isoleucine (I) at position 21, (c) Leucine (L) at position 71, (d) Leucine (L) at position 149, (e) Serine(S) at position 150, (f) Leucine (L) at position 444, (g) Threonine (T) at position 445, (h) Proline (P) at position 503, (i) F (Phenylalanine) at position 587, (j) A (Alanine) at position 620, (k) L (Leucine) at position 623, (l) T (Threonine) at position 624, (m) I (Isoleucine) at position 632, (n) Q (Glutamine) at position 692, (o) L (Leucine) at position 702, (p) I (Isoleucine) at position 781, (q) K (Lysine) at position 810, (r) L (Leucine) at position 908, (s) V (Valine) at position 931, (t) N/Q (Asparagine or Glutamine) at position 933, (u) K (Lysine) at position 954, (v) V (Valine) at position 955, (w) K (Lysine) at position 1000, (x) V (Valine) at position 1100, (y) Y (Tyrosine) at position 1232, and (z) I (Isoleucine) at position 1236; wherein the position numbers are determined by sequence alignment against SEQID NO: 1125.
[0510] Aspect 125: The synthetic composition of Aspect 1, wherein the Cas endonuclease shares at least 90% identity with a sequence selected from the group consisting of: SEQID NOs: 86-170 and 511-1135.
[0511] Aspect 126: The synthetic composition of Aspect 1, wherein the Cas endonuclease comprises a domain sharing 90% or greater identity with any of SEQID NOs: 1136-1730.
[0512] Aspect 127: The synthetic composition of Aspect 1, wherein the Cas endonuclease is fused to a heterologous polypeptide.
[0513] Aspect 128: The synthetic composition of Aspect 4, wherein the heterologous polypeptide comprises nuclease activity.
[0514] Aspect 129: The synthetic composition of Aspect 4, wherein the heterologous polypeptide is a deaminase.
[0515] Aspect 130: The synthetic composition of Aspect 1, further comprising a guide polynucleotide with which the polypeptide forms a complex.
[0516] Aspect 131: The synthetic composition of Aspect 2, wherein the guide polynucleotide is a single guide comprising a sequence selected from the group consisting of SEQID NOs: 426-510.
[0517] Aspect 132: The synthetic composition of Aspect 2, wherein the guide polynucleotide comprises a tracrRNA comprising a sequence selected from the group consisting of SEQID NOs: 341-425.
[0518] Aspect 133: The synthetic composition of Aspect 2, wherein the guide polynucleotide comprises a crRNA comprising a sequence selected from the group consisting of SEQID NOs: 171-255.
[0519] Aspect 134: The synthetic composition of Aspect 2, wherein the guide polynucleotide comprises an anti-repeat sequence comprising a sequence selected from the group consisting of SEQID NOs: 256-340.
[0520] Aspect 135: The synthetic composition of Aspect 2, wherein the guide polynucleotide guide comprises DNA.
[0521] Aspect 136: The synthetic composition of Aspect 1 that selectively hybridizes with a PAM sequence consensus listed in Tables 4-83.
[0522] Aspect 137: A Cas endonuclease or deactivated Cas endonuclease that recognizes a PAM selected from the group consisting of: NAR (G>A)WH (A>T>C)GN(C>T>R), N (C>D)V (A>S)R (G>A)TTTN(T>V), NV (A>G>C)TTTTT, NATTTTT, NN(H>G)AAAN (G>A>Y)N, N(T>V)NAAATN, NAV (A>G>C)TCNN, NN(A>S>T)NN(W>G>C)CCN (Y>R), NNAH (T>M)ACN, NGTGANN, NARN(A>K>C)ATN, NV (G>A>C)RNTTN, NN (A>B)RN(A>G>T>C)CCN, NN(A>B)NN(T>V)CCH (A>Y), NNN(H>G)NCDAA, NN (H>G)D(A>K)GGDN(A>B), NNNNCCAG, NNNNCTAA, NNNNCVGANN, N (C>D)NNTCCN, NNNNCTA, NNNNCYAA, NAGRGNY, NNGH (W>C)AAA, NNGAAAN, NNAAAAA, NTGAR (G>A)N(A>Y>G)N(Y>R), N(C>D)H(C>W)GH (Y>A)N(A>B) AN(A>T>S), NNAAACN, NNGTAM (A>C) Y, NH (A>Y) ARNN(C>W>G)N, B (C>K)GGN(A>Y>G)N NN, N(T>C>R)AGAN(A>K>C)NN, NGGN(A>T>G>C)NNN, NGGD(A>T>G)TNN, NGGAN(T>A>C>G)NN, CGGWN(T>R>C)NN, NGGWGNN, N (B>A)GGNN(T>V)NN, NNGD (A>T>G)AY (T>C)N, N(T>V)H(T>C>A)AAAAN, NRTAANN, N(H>G)CAAH (Y>A)N(Y>R)N, NATAAN(A>T>S)N, NV (A>G>C)R (A>G)ACCN, CN(C>W>G)AV (A>S)GAC, NNRNCAC, N(A>B)GGD (W>G)D(G>W)NN, BGD (G>W)GTCN(A>K>C), NAANACN, NRTHAN(A>B)N, BHN (H>G)NGN(T>M)H(Y>A), NMRN(A>Y>G)AH(C>T>A)N, NNNCACN, NARN(T>A>S)ACN, NNNNATW, NGCNGCN, NNNCATN, NAGNGCN, NARN(T>M>G)CCN, NATCCTN, NRTAAN(T>A>S)N, N(C>T>G>A)AAD (A>G>T)CNN, NAAAGNN, NNGACNN, N(T>V)NTAAD (A>T>G)N, NNGAD (G>W)NN, NGGN(W>S)NNN, N(T>V)GGD(W>G)GNN, NGGD(A>T>G)N(T>M>G)NN, NNAAAGN, N(G>H)GGDN(T>M>G)NN, NNAGAAA, NN(T>M>G)AAAAA, N(C>D)N(C>W>G)GW(T>C)D(A>G>T)AA, NAAAAYN, NRGNNNN, NATGN(H>G)TN, NNDATTT, and NATARCN(C>T>A>G).
[0523] Aspect 138: The synthetic composition of Aspect 1 that is identified from an organism listed in Table 1.
[0524] Aspect 139: The synthetic composition of Aspect 1, selected from the group consisting of SEQID NOs: 86-170.
[0525] Aspect 140: The synthetic composition of Aspect 1, wherein the target cell-optimized polypeptide lacks endonuclease activity.
[0526] Aspect 141: The synthetic composition of Aspect 1, wherein the target cell-optimized polypeptide is capable of nicking a single stranded target polynucleotide.
[0527] Aspect 142: The synthetic composition of Aspect 1, wherein the target cell-optimized polypeptide is capable of cleaving a double stranded target polynucleotide.
[0528] Aspect 143: The synthetic composition of Aspect 1, further comprising a donor DNA molecule.
[0529] Aspect 144: The synthetic composition of Aspect 1, further comprising repair template DNA molecule.
[0530] Aspect 145: The synthetic composition of Aspect 1, wherein the heterologous composition is selected from the group consisting of: a heterologous polynucleotide, a heterologous polypeptide, a particle, a solid matrix, an antibody, a buffer composition, Tris, EDTA, dithiothreitol (DTT), phosphate-buffered saline (PBS), sodium chloride, magnesium chloride, HEPES, glycerol, bovine serum albumin (BSA), a salt, an emulsifier, a detergent, a chelating agent, a redox reagent, an antibody, nuclease-free water, a viscosity agent, and a Histidine tag.
[0531] Aspect 146: The synthetic composition of Aspect 19, further comprising an additional heterologous composition.
[0532] Aspect 147: The synthetic composition of Aspect 1, further comprising a cell.
[0533] Aspect 148: The synthetic composition of Aspect 21, wherein the cell is obtained or derived from an organism selected from the group consisting of: human, non-human primate, mammal, animal, archaeal, bacterial, protist, fungal, insect, yeast, non-conventional yeast, and plant.
[0534] Aspect 149: The synthetic composition of Aspect 22, wherein the plant cell is obtained or derived from maize, rice, sorghum, rye, barley, wheat, millet, oats, sugarcane, turfgrass, switchgrass, soybean, canola, alfalfa, sunflower, cotton, tobacco, peanut, potato, tobacco, Arabidopsis, vegetable, or safflower.
[0535] Aspect 150: The synthetic composition of Aspect 22, wherein the animal cell is selected from the group consisting of: haploid cells, diploid cells, reproductive cells, neurons, muscle cells, endocrine or exocrine cells, epithelial cells, muscle cells, tumor cells, embryonic cells, hematopoietic cells, bone cells, germ cells, somatic cells, stem cells, pluripotent stem cells, induced pluripotent stem cells, progenitor cells, meiotic cells, and mitotic cells.
[0536] Aspect 151: A polynucleotide encoding the polypeptide of Aspect 1.
[0537] Aspect 152: The polynucleotide of Aspect 25, wherein in the polynucleotide is comprised within a vector that further comprises at least one heterologous polynucleotide.
[0538] Aspect 153: A kit comprising the synthetic composition of Aspect 1 or the polynucleotide of Aspect 25.
[0539] Aspect 154: The synthetic composition of Aspect 1, wherein the polypeptide is in a liquid formulation.
[0540] Aspect 155: The synthetic composition of Aspect 1, wherein the polypeptide is in a lyophilized composition.
[0541] Aspect 156: The synthetic composition of Aspect 1, wherein the polypeptide is in a substantially endotoxin-free formulation.
[0542] Aspect 157: The synthetic composition of Aspect 1, wherein the polypeptide is in a formulation with a pH of between 1.0 and 14.0, between 2.0 and 13.0, between 3.0 and 12.0, between 4.0 and 11.0, between 5.0 and 10.0, between 6.0 and 9.0, between 7.0 and 8.0, between 4.5 and 6.5, between 5.5 and 7.5, or between 6.5 and 7.5.
[0543] Aspect 158: The synthetic composition of Aspect 1, wherein the polypeptide is stored or incubated at a temperature of at least minus 200 degrees Celsius, at least minus 150 degrees Celsius, at least minus 135 degrees Celsius, at least minus 90 degrees Celsius, at least minus 80 degrees Celsius, at least minus 20 degrees Celsius, at least 4 degrees Celsius, at least 17 degrees Celsius, at least 20 degrees Celsius, at least 25 degrees Celsius, at least 30 degrees Celsius, at least 35 degrees Celsius, at least 37 degrees Celsius, at least 39 degrees Celsius, at least 40 degrees Celsius, at least 45 degrees Celsius, at least 50 degrees Celsius, at least 55 degrees Celsius, at least 60 degrees Celsius, at least 65 degrees Celsius, at least 70 degrees Celsius, or greater than 70 degrees Celsius.
[0544] Aspect 159: The synthetic composition of Aspect 1, wherein the polypeptide is attached to a solid matrix.
[0545] Aspect 160: The synthetic composition of Aspect 33, wherein the solid matrix is a particle.
[0546] Aspect 161: A method of detecting a target polynucleotide sequence, comprising: (a) obtaining the target polynucleotide, (b) combining a Cas endonuclease, a guide polynucleotide, and said target polynucleotide in a reaction vessel, (c) incubating the components of step (b) at a temperature of at least 10 degrees Celsius for at least 1 minute, (d) sequencing the resulting polynucleotide(s) in the reaction mixture, and (e) characterizing the sequence of the target polynucleotide of step (a) that was identified by the Cas endonuclease and the guide polynucleotide; (f) wherein said guide polynucleotide comprises a polynucleotide sequence that is substantially complementary to the sequence of the target polynucleotide; wherein the Cas endonuclease comprises at least one amino acid feature selected from the group consisting of: (a) Isoleucine (I) at position 13, (b) Isoleucine (I) at position 21, (c) Leucine (L) at position 71, (d) Leucine (L) at position 149, (e) Serine(S) at position 150, (f) Leucine (L) at position 444, (g) Threonine (T) at position 445, (h) Proline (P) at position 503, (i) F (Phenylalanine) at position 587, (j) A (Alanine) at position 620, (k) L (Leucine) at position 623, (l) T (Threonine) at position 624, (m) I (Isoleucine) at position 632, (n) Q (Glutamine) at position 692, (o) L (Leucine) at position 702, (p) I (Isoleucine) at position 781, (q) K (Lysine) at position 810, (r) L (Leucine) at position 908, (s) V (Valine) at position 931, (t) N/Q (Asparagine or Glutamine) at position 933, (u) K (Lysine) at position 954, (v) V (Valine) at position 955, (w) K (Lysine) at position 1000, (x) V (Valine) at position 1100, (y) Y (Tyrosine) at position 1232, and (z) I (Isoleucine) at position 1236; wherein the position numbers are determined by sequence alignment against SEQID NO: 1125.
[0547] Aspect 162: A method of binding a Cas endonuclease and guide polynucleotide complex to a target polynucleotide, comprising: (a) obtaining the sequence of said target polynucleotide, (b) combining a Cas endonuclease, a guide polynucleotide, and said target polynucleotide in a reaction vessel, (c) incubating the components of step (b) at a temperature of at least 10 degrees Celsius for at least 1 minute; wherein said guide polynucleotide comprises a polynucleotide sequence that is substantially complementary to the target polynucleotide sequence of the target polynucleotide; further comprising detecting the Cas endonuclease and guide polynucleotide complex bound to the target polynucleotide; and wherein the Cas endonuclease comprises at least one amino acid feature selected from the group consisting of: (a) Isoleucine (I) at position 13, (b) Isoleucine (I) at position 21, (c) Leucine (L) at position 71, (d) Leucine (L) at position 149, (e) Serine(S) at position 150, (f) Leucine (L) at position 444, (g) Threonine (T) at position 445, (h) Proline (P) at position 503, (i) F (Phenylalanine) at position 587, (j) A (Alanine) at position 620, (k) L (Leucine) at position 623, (l) T (Threonine) at position 624, (m) I (Isoleucine) at position 632, (n) Q (Glutamine) at position 692, (o) L (Leucine) at position 702, (p) I (Isoleucine) at position 781, (q) K (Lysine) at position 810, (r) L (Leucine) at position 908, (s) V (Valine) at position 931, (t) N/Q (Asparagine or Glutamine) at position 933, (u) K (Lysine) at position 954, (v) V (Valine) at position 955, (w) K (Lysine) at position 1000, (x) V (Valine) at position 1100, (y) Y (Tyrosine) at position 1232, and (z) I (Isoleucine) at position 1236; wherein the position numbers are determined by sequence alignment against SEQID NO: 1125.
[0548] Aspect 163: A method of creating a double strand break in a target polynucleotide, comprising: (d) obtaining the sequence of said target polynucleotide, (e) combining a Cas endonuclease polypeptide, a guide polynucleotide, and said target polynucleotide in a reaction vessel, (f) incubating the components of step (b) at a temperature of at least 10 degrees Celsius for at least 1 minute; wherein said guide polynucleotide comprises a polynucleotide sequence that is substantially complementary to the target polynucleotide sequence of the target polynucleotide; further comprising detecting the Cas endonuclease and guide polynucleotide complex bound to the target polynucleotide; and wherein the Cas endonuclease comprises at least one amino acid feature selected from the group consisting of: (a) Isoleucine (I) at position 13, (b) Isoleucine (I) at position 21, (c) Leucine (L) at position 71, (d) Leucine (L) at position 149, (e) Serine(S) at position 150, (f) Leucine (L) at position 444, (g) Threonine (T) at position 445, (h) Proline (P) at position 503, (i) F (Phenylalanine) at position 587, (j) A (Alanine) at position 620, (k) L (Leucine) at position 623, (l) T (Threonine) at position 624, (m) I (Isoleucine) at position 632, (n) Q (Glutamine) at position 692, (o) L (Leucine) at position 702, (p) I (Isoleucine) at position 781, (q) K (Lysine) at position 810, (r) L (Leucine) at position 908, (s) V (Valine) at position 931, (t) N/Q (Asparagine or Glutamine) at position 933, (u) K (Lysine) at position 954, (v) V (Valine) at position 955, (w) K (Lysine) at position 1000, (x) V (Valine) at position 1100, (y) Y (Tyrosine) at position 1232, and (z) I (Isoleucine) at position 1236; wherein the position numbers are determined by sequence alignment against SEQID NO: 1125.
[0549] Aspect 164: The method of Aspect 36 or Aspect 37, further comprising at least one additional target site.
[0550] Aspect 165: A method for editing the genome of a cell, the method comprising providing to the cell: (a) at least one Cas endonuclease comprises at least one amino acid feature selected from the group consisting of: (i) Isoleucine (I) at position 13, (ii) Isoleucine (I) at position 21, (iii) Leucine (L) at position 71, (iv) Leucine (L) at position 149, (v) Serine(S) at position 150, (vi) Leucine (L) at position 444, (vii) Threonine (T) at position 445, (viii) Proline (P) at position 503, (ix) F (Phenylalanine) at position 587, (x) A (Alanine) at position 620, (xi) L (Leucine) at position 623, (xii) T (Threonine) at position 624, (xiii) I (Isoleucine) at position 632, (xiv) Q (Glutamine) at position 692, (xv) L (Leucine) at position 702, (xvi) I (Isoleucine) at position 781, (xvii) K (Lysine) at position 810, (xviii) L (Leucine) at position 908, (xix) V (Valine) at position 931, (xx) N/Q (Asparagine or Glutamine) at position 933, (xxi) K (Lysine) at position 954, (xxii) V (Valine) at position 955, (xxiii) K (Lysine) at position 1000, (xxiv) V (Valine) at position 1100, (xxv) Y (Tyrosine) at position 1232, and (xxvi) I (Isoleucine) at position 1236; wherein the position numbers are determined by sequence alignment against SEQID NO: 1125; and (b) a guide polynucleotide with which the Cas endonuclease forms a complex; wherein the complex is capable of recognizing, binding to, and optionally nicking or cleaving a target polynucleotide sequence; and identifying at least one cell that has a modification in a genomic DNA sequence of the cell, wherein the modification is selected from the group consisting of: an insertion, a deletion, a substitution, and the addition or association of an atom or molecule to an existing nucleotide.
[0551] Aspect 166: A method of modulating the expression of a gene in a cell, the method comprising providing to the cell: (a) at least one Cas endonuclease comprises at least one amino acid feature selected from the group consisting of: (i) Isoleucine (I) at position 13, (ii) Isoleucine (I) at position 21, (iii) Leucine (L) at position 71, (iv) Leucine (L) at position 149, (v) Serine(S) at position 150, (vi) Leucine (L) at position 444, (vii) Threonine (T) at position 445, (viii) Proline (P) at position 503, (ix) F (Phenylalanine) at position 587, (x) A (Alanine) at position 620, (xi) L (Leucine) at position 623, (xii) T (Threonine) at position 624, (xiii) I (Isoleucine) at position 632, (xiv) Q (Glutamine) at position 692, (xv) L (Leucine) at position 702, (xvi) I (Isoleucine) at position 781, (xvii) K (Lysine) at position 810, (xviii) L (Leucine) at position 908, (xix) V (Valine) at position 931, (xx) N/Q (Asparagine or Glutamine) at position 933, (xxi) K (Lysine) at position 954, (xxii) V (Valine) at position 955, (xxiii) K (Lysine) at position 1000, (xxiv) V (Valine) at position 1100, (xxv) Y (Tyrosine) at position 1232, and (xxvi) I (Isoleucine) at position 1236; wherein the position numbers are determined by sequence alignment against SEQID NO: 1125, and (b) a guide polynucleotide with which the Cas endonuclease forms a complex; wherein the complex is capable of recognizing, binding to, and optionally nicking or cleaving a target polynucleotide sequence in the cell; and identifying at least one cell that has a modulated gene expression as compared to a cell that did not have the Cas endonuclease introduced.
[0552] Aspect 167: The method of Aspect 39 or Aspect 40, further comprising providing to the cell a donor DNA molecule.
[0553] Aspect 168: The method of Aspect 39 or Aspect 40, further comprising providing to the cell a template DNA molecule.
[0554] Aspect 169: The method of Aspect 39 or Aspect 40, wherein the method confers a benefit to the cell or to an organism that comprises the cell.
[0555] Aspect 170: The method of Aspect 41, wherein the benefit is selected from the group consisting of: improved health, improved growth, improved fertility, improved fecundity, improved environmental tolerance, improved vigor, improved disease resistance, improved disease tolerance, improved tolerance to a heterologous molecule, improved fitness, improved physical characteristic, greater mass, increased production of a biochemical molecule, decreased production of a biochemical molecule, upregulation of a gene, downregulation of a gene, upregulation of a biochemical pathway, downregulation of a biochemical pathway, stimulation of cell reproduction, and suppression of cell reproduction.
[0556] Aspect 171: The method of Aspect 39 or Aspect 40, wherein the cell is heterologous to the organism from which the Cas endonuclease was derived, and is selected from the group consisting of: a human, non-human primate, mammal, animal, archaeal, bacterial, protist, fungal, insect, yeast, non-conventional yeast, and plant cell.
[0557] Aspect 172: The method of Aspect 45, wherein the plant cell is obtained or derived from maize, rice, sorghum, rye, barley, wheat, millet, oats, sugarcane, turfgrass, switchgrass, soybean, canola, alfalfa, sunflower, cotton, tobacco, peanut, potato, tobacco, Arabidopsis, vegetable, or safflower.
[0558] Aspect 173: The method of Aspect 45, wherein the cell is a plant cell, and the benefit is the modulation of a trait of agronomic interest of a plant comprising said cell or a progeny cell thereof, selected from the group consisting of: disease resistance, drought tolerance, heat tolerance, cold tolerance, salinity tolerance, metal tolerance, herbicide tolerance, improved water use efficiency, improved nitrogen utilization, improved nitrogen fixation, pest resistance, herbivore resistance, pathogen resistance, yield improvement, health enhancement, improved fertility, vigor improvement, growth improvement, photosynthetic capability improvement, nutrition enhancement, altered protein content, altered oil content, increased biomass, increased shoot length, increased root length, improved root architecture, modulation of a metabolite, modulation of the proteome, increased seed weight, altered seed carbohydrate composition, altered seed oil composition, altered seed protein composition, altered seed nutrient composition; as compared to an isoline plant not comprising said target site modification or as compared to the plant prior to the modification of said target site in said plant cell.
[0559] Aspect 174: The method of Aspect 45, wherein the animal cell is selected from the group consisting of: haploid cells, diploid cells, reproductive cells, neurons, muscle cells, endocrine or exocrine cells, epithelial cells, muscle cells, tumor cells, embryonic cells, hematopoietic cells, bone cells, germ cells, somatic cells, stem cells, pluripotent stem cells, induced pluripotent stem cells, progenitor cells, meiotic cells, and mitotic cells.
[0560] Aspect 175: The method of Aspect 45, wherein the cell is an animal cell, and the benefit is the modulation of a phenotype of physiological interest of an organism comprising the animal cell, or a progeny cell thereof, selected from the group consisting of: improved health, improved nutritional status, reduced disease impact, disease stasis, disease reversal, improved fertility, improved vigor, improved mental capacity, improved organism growth, improved weight gain, weight loss, modulation of an endocrine system, modulation of an exocrine system, reduced tumor size, reduced tumor mass, stimulated cell growth, reduced cell growth, production of a metabolite, production of a hormone, production of an immune cell, and stimulation of cell production.
[0561] Aspect 176: A method of editing at least one base of a target polynucleotide, comprising: (a) contacting the target polynucleotide with: i. a deaminase, ii. a Cas endonuclease capable of selective hybridization with a PAM sequence consensus listed in Tables 4-83, wherein the Cas endonuclease has been modified to lack nuclease activity, and iii. a guide polynucleotide that shares complementarity with a sequence of the target polynucleotide, wherein the Cas endonuclease and the guide RNA form a complex that recognizes and binds to the target polynucleotide; and (b) detecting at least one modification at the DNA target site.
[0562] Aspect 177: A method of editing a plurality of bases of a target polynucleotide, comprising: (a) contacting the target polynucleotide with: i. at least one deaminase, ii. a plurality of Cas endonucleases, each capable of selective hybridization with a PAM sequence consensus listed in Tables 4-83, wherein the Cas endonucleases have been modified to lack nuclease activity, andiii. a guide polynucleotide that shares complementarity with a sequence of the target polynucleotide, wherein the Cas endonuclease and the guide RNA form a complex that recognizes and binds to the target polynucleotide; and (b) detecting at least one modification at the DNA target site.
[0563] Aspect 178: A method of optimizing the activity of a Cas molecule comprising introducing at least one nucleotide modification to a sequence that comprises at least one amino acid feature selected from the group consisting of: (a) Isoleucine (I) at position 13, (b) Isoleucine (I) at position 21, (c) Leucine (L) at position 71, (d) Leucine (L) at position 149, (e) Serine(S) at position 150, (f) Leucine (L) at position 444, (g) Threonine (T) at position 445, (h) Proline (P) at position 503, (i) F (Phenylalanine) at position 587, (j) A (Alanine) at position 620, (k) L (Leucine) at position 623, (l) T (Threonine) at position 624, (m) I (Isoleucine) at position 632, (n) Q (Glutamine) at position 692, (o) L (Leucine) at position 702, (p) I (Isoleucine) at position 781, (q) K (Lysine) at position 810, (r) L (Leucine) at position 908, (s) V (Valine) at position 931, (t) N/Q (Asparagine or Glutamine) at position 933, (u) K (Lysine) at position 954, (v) V (Valine) at position 955, (w) K (Lysine) at position 1000, (x) V (Valine) at position 1100, (y) Y (Tyrosine) at position 1232, and (z) I (Isoleucine) at position 1236; wherein the position numbers are determined by sequence alignment against SEQID NO: 1125; and identifying at least one improved characteristic as compared to the molecule prior to nucleotide modification.
[0564] Aspect 179: A method of optimizing the activity of a Cas9 molecule by subjecting a parental Cas9 molecule to at least one round of stochastic protein shuffling, and selecting a resultant molecule that has at least one characteristic not present in the parental Cas9 molecule; wherein the parental Cas9 molecule comprises at least one amino acid feature selected from the group consisting of: (a) Isoleucine (I) at position 13, (b) Isoleucine (I) at position 21, (c) Leucine (L) at position 71, (d) Leucine (L) at position 149, (e) Serine(S) at position 150, (f) Leucine (L) at position 444, (g) Threonine (T) at position 445, (h) Proline (P) at position 503, (i) F (Phenylalanine) at position 587, (j) A (Alanine) at position 620, (k) L (Leucine) at position 623, (l) T (Threonine) at position 624, (m) I (Isoleucine) at position 632, (n) Q (Glutamine) at position 692, (o) L (Leucine) at position 702, (p) I (Isoleucine) at position 781, (q) K (Lysine) at position 810, (r) L (Leucine) at position 908, (s) V (Valine) at position 931, (t) N/Q (Asparagine or Glutamine) at position 933, (u) K (Lysine) at position 954, (v) V (Valine) at position 955, (w) K (Lysine) at position 1000, (x) V (Valine) at position 1100, (y) Y (Tyrosine) at position 1232, and (z) I (Isoleucine) at position 1236; wherein the position numbers are determined by sequence alignment against SEQID NO: 1125.
[0565] Aspect 180: A method of optimizing the activity of a Cas9 molecule by subjecting a parental Cas9 molecule to at least one round of non-stochastic protein shuffling, and selecting a resultant molecule that has at least one characteristic not present in the parental Cas9 molecule; wherein the parental Cas9 molecule comprises a motif selected from the group consisting of comprises at least one amino acid feature selected from the group consisting of: (a) Isoleucine (I) at position 13, (b) Isoleucine (I) at position 21, (c) Leucine (L) at position 71, (d) Leucine (L) at position 149, (e) Serine(S) at position 150, (f) Leucine (L) at position 444, (g) Threonine (T) at position 445, (h) Proline (P) at position 503, (i) F (Phenylalanine) at position 587, (j) A (Alanine) at position 620, (k) L (Leucine) at position 623, (l) T (Threonine) at position 624, (m) I (Isoleucine) at position 632, (n) Q (Glutamine) at position 692, (o) L (Leucine) at position 702, (p) I (Isoleucine) at position 781, (q) K (Lysine) at position 810, (r) L (Leucine) at position 908, (s) V (Valine) at position 931, (t) N/Q (Asparagine or Glutamine) at position 933, (u) K (Lysine) at position 954, (v) V (Valine) at position 955, (w) K (Lysine) at position 1000, (x) V (Valine) at position 1100, (y) Y (Tyrosine) at position 1232, and (z) I (Isoleucine) at position 1236; wherein the position numbers are determined by sequence alignment against SEQID NO: 1125.

[0566] While the invention has been particularly shown and described with reference to a preferred embodiment and various alternate embodiments, it will be understood by persons skilled in the relevant art that various changes in form and details can be made therein without departing from the spirit and scope of the invention. For instance, while the particular examples below may illustrate the methods and embodiments described herein using a specific plant, the principles in these examples may be applied to any plant. Therefore, it will be appreciated that the scope of this invention is encompassed by the embodiments of the inventions recited herein and in the specification rather than the specific examples that are exemplified below. All cited patents and publications referred to in this application are herein incorporated by reference in their entirety, for all purposes, to the same extent as if each were individually and specifically incorporated by reference.

### EXAMPLES

[0567] The following are examples of specific embodiments of some aspects of the invention. The examples are offered for illustrative purposes only, and are not intended to limit the scope of the invention in any way. Efforts have been made to ensure accuracy with respect to numbers used (e.g., amounts, temperatures, etc.), but some experimental error and deviation should, of course, be allowed for.

[0568] The meaning of abbreviations is as follows: “sec” means second(s), “min” means minute(s), “h” means hour(s), “d” means day(s), “μL” or “uL” or “μl” or “ul” means microliter(s), “mL” means milliliter(s), “L” means liter(s), “μM” means micromolar, “mM” means millimolar, “M” means molar, “mmol” means millimole(s), “μmole” or “umole” mean micromole(s), “g” means gram(s), “μg” or “ug” means microgram(s), “ng” means nanogram(s), “U” means unit(s), “bp” means base pair(s) and “kB” means kilobase(s).

### Example 1: Identification of Cas9 Orthologs and their Guide RNAs

[0569] In this example, methods for identifying Cas9 proteins and their associated guide RNA(s) from Type II CRISPR (Clustered Regularly Interspaced Short Palindromic Repeats)-Cas (CRISPR associated) loci are described.

### Cas9 Identification

[0570] Type II Cas9 endonucleases were identified by first searching for the presence of clustered regularly interspaced short palindromic repeats (CRISPRs) indicative of the CRISPR-Cas nucleic acid based adaptive immune systems of bacteria and archaea (Bhaya, D. et al. (2011) Annu. Rev. Genet. 45:273-97) in public sequence collections using PILER-CR (Edgar, R. C. (2007) BMC Bioinformatics. 8:18). Following the identification of CRISPR arrays, the DNA regions surrounding the CRISPR array (about 20 kb 5′ and 3′ of the CRISPR array) were examined for the presence of open-reading frames (ORFs) encoding proteins greater than 750 amino acids. Next, to identify CRISPR associated genes homologous to Cas9, multiple sequence alignment of protein sequences from a diverse collection of Cas9 endonucleases was performed using MUSCLE (Edgar, R. C. (2004) Nucleic Acids Res. 32:1792-97) and used to build profile hidden Markov models (HMMs) for Cas9 sub-families as described previously (Fonfara, I. et al. (2014) Nucleic Acids Res. 42:2577-2590) using HMMER (Eddy, S. R. (1998) Bioinformatics. 14:755-63 and Eddy, S. R. (2011) PLOS Comput. Biol. 7: e1002195). The resulting HMMs were then utilized to search protein sequences translated from the CRISPR associated ORFs for the presence of cas genes with homology to Cas9. Only proteins comprising the key HNH and RuvC nucleolytic domains and catalytic residues defining a Type II Cas9 protein (Nishimasu, H. et al. (2014) Cell. 156:935-49) were selected. Through comparative analyses, Cas9 proteins were parsed into distinct families and representative members of each family used to construct a phylogenetic tree with MEGA7 (Kumar, S. et al. (2016) Mol. Biol. Evol. 33:1870-74) utilizing the Neighbor-Joining (Saitou, N. et al. (1987) Mol. Biol. Evol. 4:406-25) and Poisson correction (Zuckerkandl, E. et al. (1965) Evol. genes proteins. 97:97-166) methods to compute the evolutionary history.

[0571] The resulting phylogenetic tree, representing 675 Type II Cas9 sequences (SEQ ID NOs: 86-170 and 511-1135), was divided into 12 clades based on phylogenetic distance. Proteins were then selected to capture the diversity presented by Cas9 orthologs (FIG. 1). Clades giving rise to previously characterized Cas9 proteins with positive attributes (e.g. activity in eukaryotic cells or interesting protospacer adjacent motif (PAM) recognition) were mined at a rate of approximately 20% while all others were surveyed at a rate of approximately 10%. In total, 85 Cas9 proteins were selected for further characterization (Table 1).

[0572] Next, structural analyses were performed to further confirm the candidate proteins as Cas9 orthologs. First, whole sequences were aligned using Ssearch36 (Smith, T. F. and Waterman, M. S. (1981) J. Mol. Biol. 147:195-97 and Pearson, W. R. (1991) Genomics 11:635-50) with known Cas9 structures from the Protein Data Bank (PDB, The Protein Data Bank H. M. Berman, J. Westbrook, Z. Feng, G. Gilliland, T. N. Bhat, H. Weissig, I. N. Shindyalov, P. E. Bourne (2000) Nucleic Acids Research, 28:235-242). Then, the best matching structure was utilized as a template to assign functional domain boundaries according to structural domains defined in the known Cas9s. The resulting structural alignment produced six distinct groups, based on the similarity to modelling templates with largest variation at REC subdomain.

[0573] REC Group I Cas9 orthologs (SEQ ID NOs: 93, 97, 98, 99, 100, 101, 102, 103, 104, 105, 106, 107, 108, 109, 110, 111, 112, 113, 114, 115, 116, 117, 118, 136, 137, 138, 139, 140, 141, 143, 144, 145, 146, 148, 158, 160, 161, 162, 142, 168, and 169) were aligned against the Staphylococcus aureus Cas9 structure PDB ID 5CZZ_A (“Crystal structure of Staphylococcus aureus Cas9”, Nishimasu, H., Cong, L., Yan, W. X., Ran, F. A., Zetsche, B., Li, Y., Kurabayashi, A., Ishitani, R., Zhang, F., Nureki, O., (2015) Cell 162:1113-1126). The consensus sequence is shown in FIG. 4, with conserved residues depicted in bold, underlined text (X).

[0574] REC Group II (represented by a single Cas9 ortholog, SEQID NO: 96) aligned with PDB: 5czz in full length, but comprised a novel insertion of approximately 312 amino acid residues prior to the RuvCIII domain signature helix. This was a unique feature of this group.

[0575] REC Group III Cas9 orthologs (86, 87, 88, 89, 90, 91, 92, 94, 119, 120, 121, 122, 123, 124, 125, 126, 127, 128, 129, 130, 131, 132, 147, 149, 150, 151, 152, 153, 154, 155, 156, 157, 159, 163, 164, 165, 166, 167, and 170) were aligned against the Streptococcus pyogenes serotype M1 structure PDB ID 4UN3_B (“Structural Basis of Pam-Dependent Target DNA Recognition by the Cas9 Endonuclease”, Anders, C., Niewoehner, O., Duerst, A., Jinek, M., (2014) Nature 513:569-73). The consensus sequence is shown in FIG. 5, with conserved residues depicted in bold, underlined text (X).

[0576] REC Group IV Cas9 orthologs (SEQ ID NOs: 133 and 134) were aligned against the Actinomyces naeslundii structure PDB ID 4OGE_A (“Structures of Cas9 endonucleases reveal RNA-mediated conformational activation”, Jinek, M., Jiang, F., Taylor, D. W., Sternberg, S. H., Kaya, E., Ma, E., Anders, C., Hauer, M., Zhou, K., Lin, S., Kaplan, M., Iavarone, A. T., Charpentier, E., Nogales, E., Doudna, J. A., (2014) Science 343:1247997). The consensus sequence is shown in FIG. 6, with conserved residues depicted in bold, underlined text (X). The consensus sequence for Group IV featured multiple tryptophan residues, which was a unique feature among the Cas9s examined.

[0577] SEQ ID NOs: 95, 96, and 135 aligned with a known structural template only partially. Therefore, HHsearch (Soding, J. (2005) Bioinformatics. 21:951-60), a profile-profile search program, was used to extend candidate-template alignment. SEQID NO: 95 (REC Group V) aligned with PDB: 4oge fully, and SEQID NO: 135 (REC Group VI) aligned with Francisella novicida Cas9 (PDB: 5b2o) from beginning to end.

[0578] In all, sequences belonged to the Cas9 family and comprise all of the major functional domains in this order: RuvCI, bridge helix, REC, RuvCII, HNH, RuvCIII, WED, and PI (Table 2A). Like other known Cas9 proteins, there was sequence length variation, ranging from ˜1,000 to ˜1,600 residues. Table 2B lists the SEQ IDs for each domain of each Cas9 ortholog.

[0579] Compared to the phylogenic analysis, the template-based approach clustered sequences into groups coincident with their length: for example, Group I of ˜1,100 aa and Group III of ˜1,350 aa. The major sequence length variation occurred at the REC domain responsible for nucleotide-chain binding. Consistently, REC domain was also the least conserved sequence segment in Cas9 protein superfamily. Clade I-X and Group I-II-III-V were very similar to one another, forming a family, while Clade XI corresponding to Group IV and Clade XII corresponding to Group VI showed more divergence.

### Guide RNA Identification

[0580] Next, the small RNA(s) capable of complexing with and guiding the Cas9 orthologs described herein (Table 1) to recognize a DNA target sequence adjacent to an appropriate PAM (protospacer adjacent motif) were predicted. First, the trans-activating RNA (tracrRNA) essential for CRISPR RNA (crRNA) maturation (Deltcheva, E. et al. (2011) Nature. 471:602-7) and Cas9 directed target site cleavage in Type II systems (Jinek, M. et al. (2012) Science. 337:816-21 and Karvelis, T. et al. (2013) RNA Biol. 10:20-19) was identified by searching for a region in the vicinity of the cas9 gene, the anti-repeat, which may base-pair with the CRISPR repeat and was distinct from the CRISPR array(s). Once identified, the possible transcriptional directions of the putative tracrRNA(s) for each new system were established by examining the secondary structures using UNAfold (Markham, N. R. et al. (2008) Methods Mol. Biol. 453:3-31) and possible termination signals present in RNA versions corresponding to the sense and anti-sense transcription scenarios surrounding the anti-repeat as described in Karvelis, T. et al. (2015) Genome Biology. 16:253. Once the tracrRNA was predicted, the transcriptional direction of the crRNA could also be deduced (since the tracrRNA must hybridize to the crRNA with 5′ to 3′ directionality). Following guide RNA predictions, single guide RNAs (sgRNAs) representing a non-natural artificial linkage of the crRNA and tracrRNA (Jinek, M. et al. (2012) Science. 337:816-21), were designed and are listed in Table 3.

[0581] All sgRNA molecules used in this study were synthesized by in vitro transcription using TranscriptAid T7 High Yield Transcription Kit (Thermo Fisher Scientific) or transcribed directly in the in vitro translation (IVT) reaction. Templates for sgRNA transcription were generated by PCR amplifying synthesized fragments (IDT and Genscript).

### Example 2: Determination of the Protospacer Adjacent Motif Requirement and Target Cleavage Pattern for Cas9 Orthologs

[0582] In this example, methods for the rapid characterization of the protospacer adjacent motif (PAM) requirement and the position and type (e.g. blunt, 5′ overhang, or 3′ overhang) of double-stranded DNA target cleavage for orthologous Cas9 proteins are described.

[0583] To determine the PAM sequences that support DNA target recognition and cleavage, Cas9 protein was produced using either a continuous exchange 1-Step Human Coupled IVT Kit (Thermo Fisher Scientific) or a PURExpress bacterial IVT kit (New England Biolabs), following the manufacturer's recommended protocol. This was accomplished by first generating a plasmid DNA encoding the Cas9 otholog. For the Human Coupled kit, genes were human codon optimized and synthesized (Genescript, Inc. and Twist Bioscience) into pT7-N-His-GST (Thermo Fisher Scientific). For the bacterial IVT kit, genes were E. coli codon optimized, synthesized (Genescript, Inc. and Twist Bioscience), and cloned into the pET28a (New England Biolabs) expression cassette.

[0584] Following in vitro expression, Cas9 ribonucleoprotein (RNP) complexes were generated. This was carried-out by first clearing the reactions of debris centrifugation at 14,000 g for 30 min at 4° C. Next, 20 μl of supernatant containing the soluble Cas9 protein was immediately combined with 2 μg of the T7 transcribed guide RNA(s) in the presence of 1 μl (40 U) of RiboLock RNase Inhibitor (Thermo Fisher Scientific, USA) and incubated for 15 min. at room temperature. In some instances, the sgRNA was transcribed directly in the IVT reaction by supplying a DNA template containing a T7 promoter and sequence encoding the respective sgRNA. In this case, Cas9-guide RNA ribonucleoprotein (RNP) complexes were not processed any further but used directly in the next step.

[0585] Next, digestion of a randomized PAM library was then performed by gently combining 10 μl of the Cas9-guide RNA lysate mixture with 90 μl of reaction buffer (10 mM Tris-HCl, pH 7.5 at 37° C., 100 mM NaCl and 1 mM DTT, 10 mM MgCl2) and 1 μg of the 7 bp randomized PAM library from Karvelis et al. 2015 containing a T1 target sequence. After 1 h at 37° C., reactions were subject to DNA end-repaired by incubating them with 1 μl (5 U) of T4 DNA polymerase and 1 μl of 10 mM dNTP mix (Thermo Fisher Scientific, USA) for 20 min at 11° C. The reaction was then inactivated by heating it to 75° C. for 10 min. To efficiently capture free DNA ends by adapter ligation, a 3′-dA overhang was added by incubating the reaction mixture with 1 μl (5 U) of DreamTaq polymerase (Thermo Fisher Scientific, EP0701) for 30 min. at 72° C. Excess RNA was then removed from the reaction by incubating 1 μl of RNase A/T1 (Thermo Fisher Scientific, USA) for 30 min at 37° C. The resulting DNA was then purified using a Monarch PCR & DNA Cleanup purification column (New England Biolabs, USA).

[0586] Following digestion and end repair, the PAM sequences supporting cleavage were then captured by adapter ligation. This was accomplished by first preparing an adapter with a 3′-dT overhang by annealing A1 (5′-CGGCATTCCTGCTGAACCGCTCTTCCGATCT-3′ (SEQ ID NO: 1731)) and phosphorylated A2 (5′-GATCGGAAGAGCGGTTCAGCAGGAATGCCG-3′ (SEQ ID NO: 1732) oligonucleotides by heating an equimolar mixture of the two for 5 min at 95° C. and slowly cooling (˜0.1° C./s) to room temperature in Annealing (A) buffer (10 mM Tris-HCl, pH 7.5 at 37° C., 50 mM NaCl). The adapter was then ligated to the end repaired 3′-dA overhanging cleavage products by combining 100 ng of it and the adapter with 5 U of T4 Ligase (Thermo Fisher Scientific, USA) in 25 μl of ligation buffer (40 mM Tris-HCl, pH 7.8 at 25° C., 10 mM MgCl2, 10 mM DTT, 0.5 mM ATP, 5% (w/v) PEG 4000) and allowing the reaction to proceed for 1 h at room temperature.

[0587] Next, the cleaved products containing the PAM sequence were enriched using R0 (5′-GCCAGGGTTTTCCCAGTCACGA-3′ (SEQ ID NO:1733)) and the A1 oligonucleotide specific to the 7 bp PAM library and adapter, respectively. PCR was performed with Phusion High-Fidelity PCR Master Mix with high fidelity (HF) Buffer (Thermo Fisher Scientific, USA) or Q5 DNA polymerase (New England Biolabs, USA) using 10 μl of the ligation reaction as template. A two-step amplification protocol (98° C.-30 s initial denaturation, 98° C.-15 s, 72° C.-30 s denaturation, annealing and synthesis for 15 cycles and 72° C.-5 min for final extension) was used. For the samples assembled in the absence of a Cas9, PCR was performed using the R0 and the C0 primer (5′-GAAATTCTAAACGCTAAAGAGGAAGAGG-3′ (SEQ ID NO:1734)) pair with C0 being complementary to protospacer sequence. Next, the amplification products (148 bp and 145 bp for A1/R0 and C0/R0 primer pairs, respectively) were purified using a Monarch PCR & DNA Cleanup purification column (New England Biolabs, USA).

[0588] Next, the sequences and indexes required for Illumina deep sequencing were incorporated onto the ends of the Cas9 cleaved DNA fragments and the resulting products deep sequenced. This was accomplished through two rounds of PCR using Phusion High-Fidelity PCR Master Mix in HF buffer (New England Biolabs, USA) per the manufacturer's instruction. The primary PCR was assembled using 20 ng of Cas9 cleaved adapter ligated PAM-sided template and allowed to proceed for 10 cycles. The reaction uses a forward primer, F1 (5′-CTACACTCTTTCCCTACACGACGCTCTTCCGATCTAAGGCGGCATTCCTGCTGAAC-3′ (SEQ ID NO: 1735)) that can hybridize to the adapter and a reverse primer, R1 (5′-CAAGCAGAAGACGGCATACGAGCTCTTCCGATCTCGGCGACGTTGGGTC-3′ (SEQ ID NO: 1736)), that binds to a site 3′ of the region of PAM randomization. In addition to hybridizing to the adapter ligated PAM fragment, the primers also contain Illumina sequences extending off their 5′ ends. For the forward primer, the extra sequence includes a portion of the sequence required for bridge amplification (5′-CTACACTCTTTCCCTACACGACGCTCTTCCGATCT-3′ (SEQ ID NO: 1737)) followed by an interchangeable unique index sequence (5′-AAGG-3′) that permits multiple amplicons to be deconvoluted if sequenced simultaneously. For the reverse primer, the additional sequence is comprised only of that required for bridge amplification at the 3′ end of the amplicon (5′-CAAGCAGAAGACGGCATACGAGCTCTTCCGATCT-3′ (SEQ ID NO: 1738)). The following PCR cycling conditions were used: 95° C.-30 s initial denaturation, 95° C.-10 s, 60° C.-15 s, 72° C.-5 s denaturation, annealing and synthesis for 10 cycles and 72° C.-5 min for final extension. Following primary PCR, a second round of PCR amplification was performed using 2 μl (in total volume of 50 μl) of the first round PCR as template. The forward primer, F2 (5′-AATGATACGGCGACCACCGAGATCTACACTCTTTCCCTACACG-3′ (SEQ ID NO: 1739)), used in the secondary PCR hybridizes to the 5′ region of F1 further extending the sequences required for Illumina deep sequencing. The reverse primer, R2 (5′-CAAGCAGAAGACGGCATA-3′ (SEQ ID NO:1740)), used in the secondary PCR simply binds to the 3′ end of the primary PCR amplicon. The following PCR cycling conditions were used: 95° C.-30 s initial denaturation, 95° C.-10 s, 58° C.-15 s, 72° C.-5 s denaturation, annealing and synthesis for 10 cycles and 72° C.-5 min for final extension. Following library creation, amplifications were purified with a QIAquick PCR Purification Kit (Qiagen, USA) per the manufacturer's instruction and combined into a single sample in an equimolar concentration. Next, the libraries were single-read deep sequenced on a MiSeq Personal Sequencer (Illumina, USA) with a 25% (v/v) spike of PhiX control v3 (Illumina, USA) and sequences post-processed and deconvoluted per the manufacture's instruction. Note the original PAM library was also sequenced as a control to account for inherent bias that would affect downstream PAM analyses. This is carried out as described above except the forward primer in the primary PCR, C1 (5′-CTACACTCTTTCCCTACACGACGCTCTTCCGATCTGGAATAAACGCTAAAGAGGAAG AGG-3′ (SEQ ID NO:1741)), is used instead of F1 as it hybridizes directly to the protospacer region in the uncut PAM library.

[0589] Next, PAM recognition was evaluated. This was accomplished by first generating a collection of sequences representing all possible outcomes of double stranded DNA cleavage and adapter ligation within the target region. For example, cleavage and adapter ligation at just after the third position of the target would produce the following sequence (5′-CTTCCGATCTACA-3′ (SEQ ID NO:1742)) where the adapter and target sequences comprise 5′-CTTCCGATCT-3′ (SEQ ID NO:1743) and 5′-ACA-3′, respectively. Next, these sequences were searched for in the sequence datasets along with a 10 bp sequence 5′ of the 7 bp PAM region (5′-AGTTGACCCA-3′ (SEQ ID NO:1744)). Protospacer-adapter ligation positions where Illumina sequences were recovered in excess resulting in a peak or spike of read coverage over negative controls were denoted as the cleavage position (FIGS. 9A-9C). Those Cas9 proteins that produced dominant cleavage at a protospacer position other than just after 3 were then re-examined by also capturing the cleavage product resulting from cleavage, end-repair, 3′ adenine addition, and adapter ligation of protospacer side of the cleaved library target (FIG. 10A). Finally, the resulting frequencies were then compared for both the protospacer and PAM sides of cleavage and used to determine the position and type of cleavage taking T4 DNA polymerase end-repair into consideration (FIG. 10B).

[0590] Next, the sequences comprised of the dominant cleavage point were examined for PAM preferences. This was accomplished by isolating the PAM sequence from these reads and trimming away the 5′ and 3′ flanking sequences. Next, the frequency of the extracted PAM sequences was normalized to the original PAM library to account for bias inherent to the initial library. First, identical PAM sequences were enumerated, and frequency calculated versus the total reads in the dataset. Then, normalization was performed for each PAM using the following equation such that PAM sequences that were under- or over-represented in the initially library were accounted for:

Normalized Frequency=(Treatment Frequency)/(((Control Frequency)/(Average Control Frequency)))

[0591] After normalization, a position frequency matrix (PFM) was calculated. This was done by weighting each nucleotide at each position based on the frequency (normalized) associated with each PAM. For example, if a PAM of 5′-CGGTAGC-3′ had a normalized frequency of 0.15%, then the C at first position would be given a frequency of 0.15% when determining the nucleotide frequency for the first PAM position. Next, the overall contribution of each nucleotide at each position in the dataset was summed and organized into a table with the most abundant nucleotides indicating Cas9 PAM preferences (Tables 4-83, wherein: A=Adenine, C=Cytosine, G=Guanine, T=Thymine, R=A or G, Y=C or T, S-G or C, W=A or T, D=A or G or T, H-A or C or T, K=G or T, M=A or C, N=any base, B=C or G or T, V=A or C or G) and displayed as a WebLogo (FIG. 3).

[0592] IVT method results were confirmed with purified ribonucleoprotein (RNP), at several different concentrations. The WebLogo comparisons for selected Cas9 orthologs are shown in FIG. 8.

[0593] In all, a diverse range of PAM sequence preferences were obtained. These included novel G-rich, C-rich, A-rich, and T-rich PAM recognition. Additionally, approximately 10% of the Cas9 orthologs surveyed exhibited 5′ staggered overhanging cleavage (1-3nt) as opposed to a blunt DNA target cleavage pattern typified by other Cas9s. Taken together, this diversity presented by Cas9 orthologs provides a wealth of DNA target recognition and biophysical properties that may be harnessed for genome editing applications.

### Example 3: Expression Analysis in E. coli Cells

[0594] Upon determination of the PAM requirements and functional sgRNA sequence, candidates of interest were selected for expression analysis in and purification from E. coli cells. Primary selection criteria include desirable or other interesting PAMs, genome editing activity, unusual cleavage patterns, and protein size. Candidate Cas9 nuclease encoding genes were sub-cloned into E. coli expression vectors, to yield constructs encoding fusion proteins comprising a C-terminal 6-His-tag. In some instances, sequences encoding nuclear localization sequences (SV40 origin) were incorporated onto the 5′ and 3′ ends of the Cas9 gene as well. The expression analysis may be performed in different E. coli strains under various growth conditions (media, temperature, induction) and detected by SDS-PAGE and Western blot analysis. At least some Cas9 proteins were soluble when expressed in E. coli, and soluble and stable when purified. Optimized conditions can be chosen for purification. Proteins were purified from cell lysate using standard IMAC and ion-exchange chromatography.

[0595] Cas9 proteins that were successfully purified at flask scale were advanced to expression trials in high-density bioreactors. Scalable purification schemes amenable to GMP (Good Manufacturing Practices) manufacture are determined. Optimal storage conditions and the stability of purified protein are determined using a combination of nano differential scanning fluorimetry (nanoDSF) and in vitro DNA endonuclease assays. DNA endonuclease assays are performed on fluorescently end-labeled DNA fragments and detected and quantified using capillary electrophoresis in 96-well plates.

### Example 4: In Vitro Method for Modification of a Target Polynucleotide with Cas9 Ortholog Nuclease

[0596] The compositions disclosed herein may be utilized outside of a typical cellular environment for in vitro modification of one or more target polynucleotides. In some aspects, the target polynucleotide is isolated and purified from a genomic source. In some aspects, the target polynucleotide is on a circularized or linearized plasmid. In some aspects, the target polynucleotide is a PCR product. In some aspects, the target polynucleotide is a synthesized oligonucleotide.

[0597] In some aspects, said modification includes binding to, nicking, or cleaving a target polynucleotide.

### Materials

[0598] The following materials were used:
[0599] a. a Cas9 ortholog polypeptide, a cas9 ortholog polynucleotide, a functional Cas9 ortholog variant, a functional Cas9 ortholog fragment, a fusion protein comprising an active or deactivated Cas9 ortholog, a Cas9 ortholog further comprising one or more nuclear localization sequences (NLS) on the C-terminus or on the N-terminus or on both the N- and C-termini, a biotinylated Cas9 ortholog, a Cas9 ortholog nickase, a Cas9 ortholog endonuclease, a Cas9 ortholog further comprising a Histidine tag, a mixture of Cas9 orthologs with different PAM specificities, or a mixture of any two or more of the preceding.
[0600] b. 10× reaction buffer at pH 6.5:200 mM HEPES, 50 mM MgCl2, 1M NaCl, 1 mM EDTA or equivalent buffer that supports activity
[0601] c. a proteinase (e.g., Proteinase K, molecular biology grade, New England BioLabs product #P8107S)
[0602] d. nuclease-free water
[0603] e. a sgRNA or other guide polynucleotide comprising the targeting sequence in the region of interest on the target (substrate) polynucleotide, wherein the targeting sequence is substantially complementary to a fragment of the target sequence of the target (substrate) polynucleotide
[0604] f. a target (substrate) polynucleotide, comprising the target sequence
[0605] g. It is preferred to keep the molar ratio of Cas9 and the sgRNA/guide polynucleotide per target site at a 1:1:1 or higher, to obtain the best cleavage efficiency.

### Method

[0606] Each 30 ul reaction was assembled at room temperature:
[0607] 1. 20 ul nuclease-free water
[0608] 2. 3 ul 10× reaction buffer
[0609] 3. sgRNA or other polypeptide
[0610] 4. Cas9 ortholog or other molecule described in part a. of the Materials section

[0611] The mixture was incubated at 25 degrees Celsius (or other temperature which supports ribonucleoprotein complex formation) for 1 or more minutes. Substrate polynucleotide was added. The mixture was mixed thoroughly and pulse-spun in a microfuge. The sample was incubated at 37 degrees Celsius (or other temperature that supports optimal activity) for 5 or more minutes. 1 μl of proteinase was added to each sample, which was then mixed thoroughly and pulse-spun in a microfuge. The sample was incubated at room temperature for 10 minutes, and prepared for subsequent analysis.

### Example 5: In Vitro Characterization of Purified Proteins

[0612] Purified Cas9 proteins that were amenable to manufacturing (those that include desired stability, solubility, and/or other properties) were further characterized in vitro. First, the PAM sequences determined by the aforementioned assay were confirmed by standard plasmid DNA cleavage (Karvelis et al., 2015). The cleavage patterns of each Cas9 were tested using plasmid with optimal PAM and at least three different targets (different CG content). Next cleavage conditions and optimal sgRNA structure were determined using in vitro DNA endonuclease assays, and cell-based genome editing assays.

[0613] Data for some of the Cas9 orthologs tested with two different lengths of spacers (20 nucleotides and 24 nucleotides) is shown in FIG. 11.

[0614] Variants that showed similar or better in vitro cleavage efficiency than SpCas9 were selected for additional testing. Table 84 summarizes the in vitro and in vivo cleavage data obtained for a representative number of Cas9 orthologs.

### Example 6: Evaluation of Homology-Directed Repair (HDR) Activity

[0615] Cleavage activity of novel Cas9 orthologs for certain target/targets in vitro, in cultured human cells, and in plant cells is determined. A cell line-based gain-of-function fluorescent reporter system is engineered for evaluation of HDR efficiency induced by a Cas9 protein. Briefly, the eGFP gene is inactivated by inserting region containing multiple STOP codons and PAMs for various novel Cas9s. Two approaches (FIGS. 7A-7B) may be tested: i) the homology arms for repair (˜500 bp) is duplicated in eGFP gene; ii) repair template is introduced into the cell together with Cas9. For direct comparison of different Cas9 proteins, the transfection efficiency and Cas9 expression are normalized.

[0616] Direct counting of green cells allows scoring for the HDR frequency, whereas subsequently performed T7 endonuclease assay (or deep sequencing) enables evaluation of the cleavage- and NHEJ efficiency in the same cells. These experiments lead to selection of novel Cas9 proteins with cleavage reparation output shifted to HDR. This system has the advantage of allowing for the direct comparison of HDR efficiency between Cas9 nuclease systems. The biophysical properties of the Cas9 orthologs is assessed, including: blunt-end or sticky overhang DNA cleavage, target site release, and frequency of recurrent target site cleavage. HDR analysis coupled with detailed characterization of in vitro DNA cleavage assists with connecting biophysical properties of Cas9 nucleases with desirable HDR outcomes.

### Example 7: In Vivo Modification of a Plant Cell Target Polynucleotide with Cas9 Ortholog Nucleases

[0617] In some aspects, the compositions disclosed herein may be utilized to modify a target polynucleotide in the genome of a cell. In some aspects, said cell is a eukaryotic cell. In one example of a eukaryotic cell, a plant cell is used. Transformation of a eukaryotic cell with a Cas9 ortholog to effect genomic polynucleotide editing can be accomplished by various methods known to be effective in plants, including particle-mediated delivery, Agrobacterium-mediated transformation, PEG-mediated delivery, and electroporation. It is appreciated that any method known in the art may be utilized. Example methods are described below.

[0618] To confer efficient expression, the novel Cas9 endonuclease gene, was optimized per standard techniques known in the art and the potato ST-LS1 intron 2 introduced in order to eliminate its expression in E. coli and Agrobacterium. To facilitate nuclear localization in maize cells, a nucleotide sequence encoding two versions of Simian virus 40 (SV40) monopartite nuclear localization signal was added to either the 5 prime, 3 prime, or both 5 prime and 3 prime ends. The resulting sequences encoding the different optimized Cas9 endonuclease gene and nuclear localization signal variants, were then operably linked to a promoter, for example a maize ubiquitin promoter, maize ubiquitin 5′ untranslated region (UTR), maize ubiquitin intron 1, and suitable terminator, by standard molecular biological techniques.

[0619] The Cas9 endonuclease is directed by small RNAs (referred to herein as guide RNAs) to cleave double-stranded DNA. These guide RNAs comprise a sequence that aids recognition by Cas9 (referred to as Cas9 recognition domain) and a sequence that serves to direct Cas9 cleavage by base pairing with one strand of the DNA target site (Cas9 variable targeting domain). To transcribe small RNAs necessary for directing Cas9 endonuclease cleavage activity in maize cells, a U6 polymerase III promoter and terminator are isolated from maize and operably fused to the ends of DNA sequences that upon transcription would result in a suitable guide RNA for a Cas9 nuclease. To promote optimal transcription of the guide RNA from the maize U6 polymerase III promoter a G nucleotide was added to the 5′ end of the sequence to be transcribed.

### Particle-Mediated Delivery

[0620] Transformation of maize immature embryos using particle delivery is performed as follows. Media recipes follow below.

[0621] The ears are husked and surface sterilized in 30% Clorox bleach plus 0.5% Micro detergent for 20 minutes, and rinsed two times with sterile water. The immature embryos are isolated and placed embryo axis side down (scutellum side up), 25 embryos per plate, on 560Y medium for 4 hours and then aligned within the 2.5-cm target zone in preparation for bombardment. Alternatively, isolated embryos are placed on 560 L (Initiation medium) and placed in the dark at temperatures ranging from 26° C. to 37° C. for 8 to 24 hours prior to placing on 560Y for 4 hours at 26° C. prior to bombardment as described above.

[0622] Plasmids comprising the Cas9 ortholog and donor DNA are constructed using standard molecular biology techniques and co-bombarded with plasmids containing the developmental genes ODP2 (AP2 domain transcription factor ODP2 (Ovule development protein 2); US20090328252 A1) and Wushel (US2011/0167516).

[0623] The plasmids and DNA of interest are precipitated onto 0.6 micrometer (average diameter) gold pellets using a water-soluble cationic lipid transfection reagent as follows. DNA solution is prepared on ice using 1 ug of plasmid DNA and optionally other constructs for co-bombardment such as 50 ng (0.5 ul) of each plasmid containing the developmental genes ODP2 (AP2 domain transcription factor ODP2 (Ovule development protein 2); US20090328252 A1) and Wushel. To the pre-mixed DNA, 20 ul of prepared gold particles (15 mg/ml) and 5 ul of a water-soluble cationic lipid transfection reagent is added in water and mixed carefully. Gold particles are pelleted in a microfuge at 10,000 rpm for 1 min and supernatant is removed. The resulting pellet is carefully rinsed with 100 ml of 100% EtOH without resuspending the pellet and the EtOH rinse is carefully removed. 105 ul of 100% EtOH is added and the particles are resuspended by brief sonication. Then, 10 ul is spotted onto the center of each macrocarrier and allowed to dry about 2 minutes before bombardment.

[0624] Alternatively, the plasmids and DNA of interest are precipitated onto 1.1 um (average diameter) tungsten pellets using a calcium chloride (CaCl2) precipitation procedure by mixing 100 ul prepared tungsten particles in water, 10 ul (1 ug)DNA in Tris EDTA buffer (1 ug total DNA), 100 ul 2.5 M CaCl2, and 10 ul 0.1 M spermidine. Each reagent is added sequentially to the tungsten particle suspension, with mixing. The final mixture is sonicated briefly and allowed to incubate under constant vortexing for 10 minutes. After the precipitation period, the tubes are centrifuged briefly, liquid is removed, and the particles are washed with 500 ml 100% ethanol, followed by a 30 second centrifugation. Again, the liquid is removed, and 105 ul of 100% ethanol is added to the final tungsten particle pellet. For particle gun bombardment, the tungsten/DNA particles are briefly sonicated. 10 ul of the tungsten/DNA particles is spotted onto the center of each macrocarrier, after which the spotted particles are allowed to dry about 2 minutes before bombardment.

[0625] The sample plates are bombarded at level #4 with a Biorad Helium Gun. All samples receive a single shot at 450 PSI, with a total of ten aliquots taken from each tube of prepared particles/DNA.

[0626] Following bombardment, the embryos are incubated on 560P (maintenance medium) for 12 to 48 hours at temperatures ranging from 26 C to 37 C, and then placed at 26 C. After 5 to 7 days the embryos are transferred to 560R selection medium containing 3 mg/liter Bialaphos, and subcultured every 2 weeks at 26 C. After approximately 10 weeks of selection, selection-resistant callus clones are transferred to 288J medium to initiate plant regeneration. Following somatic embryo maturation (2-4 weeks), well-developed somatic embryos are transferred to medium for germination and transferred to a lighted culture room. Approximately 7-10 days later, developing plantlets are transferred to 272V hormone-free medium in tubes for 7-10 days until plantlets are well established. Plants are then transferred to inserts in flats (equivalent to a 2.5″ pot) containing potting soil and grown for 1 week in a growth chamber, subsequently grown an additional 1-2 weeks in the greenhouse, then transferred to Classic 600 pots (1.6 gallon) and grown to maturity. Plants are monitored and scored for transformation efficiency, and/or modification of regenerative capabilities.

[0627] Initiation medium (560 L) comprises 4.0 g/l N6 basal salts (SIGMA C-1416), 1.0 ml/l Eriksson's Vitamin Mix (1000×SIGMA-1511), 0.5 mg/l thiamine HCl, 20.0 g/l sucrose, 1.0 mg/l 2,4-D, and 2.88 g/l L-proline (brought to volume with D-I H2O following adjustment to pH 5.8 with KOH); 2.0 g/l Gelrite (added after bringing to volume with D-I H2O); and 8.5 mg/l silver nitrate (added after sterilizing the medium and cooling to room temperature).

[0628] Maintenance medium (560P) comprises 4.0 g/l N6 basal salts (SIGMA C-1416), 1.0 ml/l Eriksson's Vitamin Mix (1000×SIGMA-1511), 0.5 mg/l thiamine HCl, 30.0 g/l sucrose, 2.0 mg/l 2,4-D, and 0.69 g/l L-proline (brought to volume with D-I H2O following adjustment to pH 5.8 with KOH); 3.0 g/l Gelrite (added after bringing to volume with D-I H2O); and 0.85 mg/l silver nitrate (added after sterilizing the medium and cooling to room temperature).

[0629] Bombardment medium (560Y) comprises 4.0 g/l N6 basal salts (SIGMA C-1416), 1.0 ml/l Eriksson's Vitamin Mix (1000×SIGMA-1511), 0.5 mg/l thiamine HCl, 120.0 g/l sucrose, 1.0 mg/l 2,4-D, and 2.88 g/l L-proline (brought to volume with D-I H2O following adjustment to pH 5.8 with KOH); 2.0 g/l Gelrite (added after bringing to volume with D-I H2O); and 8.5 mg/l silver nitrate (added after sterilizing the medium and cooling to room temperature).

[0630] Selection medium (560R) comprises 4.0 g/l N6 basal salts (SIGMA C-1416), 1.0 ml/l Eriksson's Vitamin Mix (1000×SIGMA-1511), 0.5 mg/l thiamine HCl, 30.0 g/l sucrose, and 2.0 mg/l 2,4-D (brought to volume with D-I H2O following adjustment to pH 5.8 with KOH); 3.0 g/l Gelrite (added after bringing to volume with D-I H2O); and 0.85 mg/l silver nitrate and 3.0 mg/l bialaphos (both added after sterilizing the medium and cooling to room temperature).

[0631] Plant regeneration medium (288J) comprises 4.3 g/l MS salts (GIBCO 11117-074), 5.0 ml/l MS vitamins stock solution (0.100 g nicotinic acid, 0.02 g/l thiamine HCL, 0.10 g/l pyridoxine HCL, and 0.40 g/l glycine brought to volume with polished D-I H2O) (Murashige and Skoog (1962) Physiol. Plant. 15:473), 100 mg/l myo-inositol, 0.5 mg/l zeatin, 60 g/l sucrose, and 1.0 ml/l of 0.1 mM abscisic acid (brought to volume with polished D-I H2O after adjusting to pH 5.6); 3.0 g/l Gelrite (added after bringing to volume with D-I H2O); and 1.0 mg/l indoleacetic acid and 3.0 mg/l bialaphos (added after sterilizing the medium and cooling to 60° C.).

[0632] Hormone-free medium (272V) comprises 4.3 g/l MS salts (GIBCO 11117-074), 5.0 ml/l MS vitamins stock solution (0.100 g/l nicotinic acid, 0.02 g/l thiamine HCL, 0.10 g/l pyridoxine HCL, and 0.40 g/l glycine brought to volume with polished D-I H2O), 0.1 g/l myo-inositol, and 40.0 g/l sucrose (brought to volume with polished D-I H2O after adjusting pH to 5.6); and 6 g/l bacto-agar (added after bringing to volume with polished D-I H2O), sterilized and cooled to 60° C.

[0633] The delivery of RNP (ribonucleoprotein) in to cells, including plant or animal cells, has several advantages compared to plasmid or RNA. When intact complex is delivered in to cell, the DNA may be modified faster and with higher efficiency. In addition, the concentration of Cas9 may be controlled more strictly in this case, potentially lowering the rate of off-targets.

[0634] For maize transformation, particle gun transformation of Hi-Type II 8 to 10-day-old immature embryos (IEs) was carried-out similar to that described previously (Svitashev et al. 2015 and Karvelis et al. 2015). Briefly, DNA expression cassettes were co-precipitated onto 0.6 μM (average size) gold particles utilizing TransIT-2020, pelleted by centrifugation, washed with absolute ethanol and re-dispersed by sonication. Following sonication, 10 μl of the DNA coated gold particles were loaded onto a macrocarrier and air dried. Next, biolistic transformation was performed using a PDS-1000/He Gun (Bio-Rad) with a 425 lb per square inch rupture disc. Since particle gun transformation can be highly variable, a visual marker DNA expression cassette encoding a cyan fluorescent protein (CFP) was also co-delivered to aid in the selection of evenly transformed IEs and each treatment was performed in triplicate.

### Agrobacterium-Mediated Transformation

[0635] Agrobacterium-mediated transformation is performed essentially as described in Djukanovic et al. (2006) Plant Biotech J 4:345-57. Briefly, 10-12 day old immature embryos (0.8-2.5 mm in size) are dissected from sterilized kernels and placed into liquid medium (4.0 g/L N6 Basal Salts (Sigma C-1416), 1.0 ml/L Eriksson's Vitamin Mix (Sigma E-1511), 1.0 mg/L thiamine HCl, 1.5 mg/L 2, 4-D, 0.690 g/L L-proline, 68.5 g/L sucrose, 36.0 g/L glucose, pH 5.2). After embryo collection, the medium is replaced with 1 ml Agrobacterium at a concentration of 0.35-0.45 OD550. Maize embryos are incubated with Agrobacterium for 5 min at room temperature, then the mixture is poured onto a media plate containing 4.0 g/L N6 Basal Salts (Sigma C-1416), 1.0 ml/L Eriksson's Vitamin Mix (Sigma E-1511), 1.0 mg/L thiamine HCl, 1.5 mg/L 2, 4-D, 0.690 g/L L-proline, 30.0 g/L sucrose, 0.85 mg/L silver nitrate, 0.1 nM acetosyringone, and 3.0 g/L Gelrite, pH 5.8. Embryos are incubated axis down, in the dark for 3 days at 20° C., then incubated 4 days in the dark at 28° C., then transferred onto new media plates containing 4.0 g/L N6 Basal Salts (Sigma C-1416), 1.0 ml/L Eriksson's Vitamin Mix (Sigma E-1511), 1.0 mg/L thiamine HCl, 1.5 mg/L 2, 4-D, 0.69 g/L L-proline, 30.0 g/L sucrose, 0.5 g/L MES buffer, 0.85 mg/L silver nitrate, 3.0 mg/L Bialaphos, 100 mg/L carbenicillin, and 6.0 g/L agar, pH 5.8. Embryos are subcultured every three weeks until transgenic events are identified. Somatic embryogenesis are induced by transferring a small amount of tissue onto regeneration medium (4.3 g/L MS salts (Gibco 11117), 5.0 ml/L MS Vitamins Stock Solution, 100 mg/L myo-inositol, 0.1 μM ABA, 1 mg/L IAA, 0.5 mg/L zeatin, 60.0 g/L sucrose, 1.5 mg/L Bialaphos, 100 mg/L carbenicillin, 3.0 g/L Gelrite, pH 5.6) and incubation in the dark for two weeks at 28° C. All material with visible shoots and roots are transferred onto media containing 4.3 g/L MS salts (Gibco 11117), 5.0 ml/L MS Vitamins Stock Solution, 100 mg/L myo-inositol, 40.0 g/L sucrose, 1.5 g/L Gelrite, pH 5.6, and incubated under artificial light at 28° C. One week later, plantlets are moved into glass tubes containing the same medium and grown until they were sampled and/or transplanted into soil.

### Ribonucleoprotein Transformation

[0636] A Cas9 and associated guide polynucleotide(s) ribonucleoprotein (RNP) complex can be recombinantly expressed and purified. RNP complex assembly can be carried-out directly in the cell recombinantly expressing the components or in vitro. Following purification, the RNP complex(es) can be delivered by particle gun transformation as described in Svitashev, S. et al. (2016) Nat. Commun. 7:13274. Briefly, RNPs (and optionally DNA expression) are precipitated onto 0.6 mm (average diameter) gold particles (Bio-Rad, USA) using a water soluble cationic lipid TransIT-2020 (Mirus, USA) as follows: 50 ml of gold particles (water suspension of 10 mg/ml) and 2 ml of TransIT-2020 water solution are added to the premixed RNPs (and optionally DNA expression vectors), mixed gently, and incubated on ice for 10 min. RNP/DNA-coated gold particles are then pelleted in a microfuge at 8,000 g for 30 s and supernatant is removed. The pellet is then resuspended in 50 ml of sterile water by brief sonication. Immediately after sonication, coated gold particles are loaded onto a microcarrier (10 ml each) and allowed to air dry. Immature maize embryos, 8-10 days after pollination, are then bombarded using a PDS-1000/He Gun (Bio-Rad, USA) with a rupture pressure of 425 pounds per inch square. Post-bombardment culture, selection, and plant regeneration are performed as previously described above.

### Variations in Delivery

[0637] Cas9 and guide polynucleotide can be delivered as DNA expression cassettes, RNA, messenger RNA (5′-capped and polyadenylated), or protein or combinations thereof. Cell lines or transformants can also be established stably expressing all but one or more of the components needed to form a functional guide polynucleotide/Cas complex so that upon delivery of the missing component(s) a functional guide polynucleotide/Cas complex can form.

### Sequence Verification of Genomic Polynucleotide Modification

[0638] Samples of a transformed plant are obtained and sequenced via any method known in the art, and compared to the genomic sequences of an isoline plant not transformed with the Cas9 and/or guide polynucleotide. The presence of non-homologous end-joining (NHEJ) insertion and/or deletion (indel) mutations resulting from DNA repair can also be used as a signature to detect cleavage activity.

[0639] This can be performed 2 days or longer after transformation. A variety of tissues can be samples, included but not limited to callus and leaf tissue. Total genomic DNA can be extracted and the region surrounding the intended target site can be PCR amplified with Phusion® HighFidelity PCR Master Mix (New England Biolabs, M0531L) adding on the sequences necessary for amplicon-specific barcodes and Illumina sequencing using “tailed” primers through two rounds of PCR and deep sequenced. The resulting reads can then examined for the presence of mutations at the expected site of cleavage by comparison to control experiments where the small RNA transcriptional cassette is omitted from the transformation.

### Sequence Verification of Genomic Polynucleotide Modification

[0640] The cellular cleavage activity of Cas9 orthologs was assessed in Zea mays using a rapid transient assay as described previously (Svitashev et al. 2015 and Karvelis et al. 2015). Briefly, after 2 days, the 20-30 most evenly transformed IEs were harvested based on their fluorescence. Total genomic DNA was extracted and the region surrounding the intended target site was PCR amplified with Phusion® HighFidelity PCR Master Mix (New England Biolabs, M0531L) adding on the sequences necessary for amplicon-specific barcodes and Illumina sequencing using “tailed” primers through two rounds of PCR and deep sequenced. The resulting reads were then examined for the presence of mutations at the expected site of cleavage by comparison to control experiments where the small RNA transcriptional cassette is omitted from the transformation.

[0641] FIG. 16 shows the results of two different Cas9 orthologs (ID33 and ID64) across three different target sites (MS45, MS26, and LIG) in maize TO plants, as compared to control plants modified with S. pyogenes Cas9. FIGS. 15 and 19 show the mutant read results of Cas9 orthologs ID33 (FIG. 15A), ID64 (FIG. 15B), ID46 (FIG. 19A), and ID56 (FIG. 19B), in maize cells.

### Example 8: In Vivo Modification of a Human Cell Target Polynucleotide with Cas9 Ortholog Nucleases

[0642] The genome editing activity of selected Cas9 proteins is measured in the human model cell line HEK293. Cells are co-transfected with plasmids encoding Cas9 candidates together with U6-driven dsDNA encoding their cognate sgRNA. This approach does not require purified protein and is initiated once the PAM preferences and sgRNA(s) supportive of cleavage activity are determined. Targeting endogenous genes allows evaluation of the activity of the selected Cas9s on chromosomal DNA. The targeting frequencies of endogenous human genes is tested using a T7 endonuclease assay and then evaluated by deep sequencing PCR amplicons spanning the targeted regions. Wild-type and mutant amplicons are counted to derive editing scores. Editing scores for each target are combined to obtain an aggregate score. Three to five different targets for each Cas9 protein are tested. Genome editing activity for selected Cas9 candidates are compared to activity for SpCas9 in parallel transfections. For candidate Cas9 nucleases, nearby or overlapping (if possible) target locations are targeted, matching target GC content as closely as possible to SpCas9 targets.

[0643] Deep sequencing not only allows comparison of cleavage efficiencies of investigated Cas9 proteins, but also provides valuable information about dominant NHEJ repair outcomes for dsDNA breaks generated with each of the novel Cas9 orthologs. The delivery of RNP (ribonucleoprotein) in to cells, including plant or animal cells, has several advantages compared to plasmid or RNA. When intact complex is delivered in to cell, the DNA may be modified faster and with higher efficiency. In addition, the concentration of Cas9 may be controlled more strictly in this case, potentially lowering the rate of off-targets. To validate the functional activity of novel Cas9 nucleases in human cells, RNP complexes are assembled using purified proteins and in vitro transcribed sgRNAs. RNPs are introduced into HEK293 cells by electroporation. Genome editing activity is assessed as described above using T7 endonuclease I assays and deep sequencing of amplicons corresponding to genomic targets. Genome editing efficiency of novel Cas9 variants are compared to that of SpCas9. Variants that show similar or better genome editing efficiency than SpCas9 bearing the same NLS and His-tag sequences are selected. This approach allows prediction of the functional activity of new Cas9 nucleases when introduced as RNP into model cells, which is useful for the development of new methods for delivery of gene editing tools.

### Cell Culture Electroporation

[0644] Cas9 RNPs were electroporated into HEK293 (ATCC Cat #CRL-1573) cells using the Lonza 4D-Nucleofector System and the SF Cell Line 4D-Nucleofector® X Kit (Lonza). For each electroporation, RNPs were formed by incubating 100 pmoles of sgRNA with 50 pmoles of Cas9 protein in nucleofector solution in a volume of 17 μL at room temperature for 20 minutes. HEK293 cells were released from culture vessels using TrypLE™ Express Enzyme 1× (ThermoFisher) washed with 1×PBS without Ca++ or Mg++ (ThermoFisher) and counted using a XXX LUNA™ Automated Cell Counter (Logos Biosystems) XXX. For each electroporation, 1×10\hat{ }5 live cells were resuspended in 9 μL electroporation solution. Cells and RNP were mixed and transferred to one well of a 16-well strip and electroporated using the CM-130 program. 75 μL of pre-warmed culture was added to each well and 10 μL of the resultant resuspended cells were dispensed into a well of a 96-well culture vessel containing 125 μL of pre-warmed culture medium. Electroporated cells were incubated at 37° C., 5% CO2 in a humidified incubator for 48 hours before analysis of genome editing.

### Cell Culture Lipofection

[0645] Human embryonic kidney (HEK) cell line 293 (ATCC-CRL-1573) was maintained in Dulbecco's modified Eagle's Medium (DMEM) with GlutaMAX (Thermo Fisher Scientific), supplemented with 10% fetal bovine serum (Thermo Fisher Scientific) and 10,000 units/mL penicillin, and 10,000 μg/mL streptomycin (Thermo Fisher Scientific) at 37° C. with 5% CO2 incubation.

[0646] HEK293 cells were seeded into 96-well plates (Thermo Fisher Scientific) one day prior to transfection at a density of 18,000 cells per well. Cells were transfected using Lipofectamine 3000 (Thermo Fisher Scientific) following the manufacturer's recommended protocol. For each well of a 96-well plate a total amount of 200 ng DNA containing 30 fmol of plasmid Cas9 encoding plasmid and 27 fmol of PCR fragment with appropriate U6-gRNA template was used.

[0647] Cells were incubated at 37° C. for 48 hours post transfection in 5% CO2 before genomic DNA extraction. The cells were washed twice with 200 μl 1×DPBS (Thermo Fisher Scientific) and resuspended in 25 μl 50 mM Tris-HCl, 150 mM NaCl, 0.05% Tween 20, pH 7.6 (Sigma Aldrich) and 0.2 mg/ml Proteinase K (Thermo Fisher Scientific) lysis buffer. Resuspended cells were incubated at 55° C. for 30 minutes and 98° C. for 20 minutes. Genomic region surrounding each Cas9 target site was PCR amplified using primers X and Y and analyzed with T7 endonuclease as described above.

### Sequence Verification of Genomic Polynucleotide Modification

[0648] For genome editing analysis, genomic DNA was extracted 48 h post electroporation using 50 μL of Epicentre QuickExtract™ DNA Extraction Solution for each well of a 96-well culture vessel according the to the manufacturer's recommendations. Regions surrounding the intended target sites were PCR amplified using Q5® Hot Start High-Fidelity 2× Master Mix (NEB) according to the manufacturer's suggestion, and using 2 μL of genomic DNA (diluted 1:5 in water) in 25 μL reactions.

[0649] Genome editing was estimated using T7 Endonuclease I assays. 5 μL of each PCR reaction was combined with 2 μL NEBuffer 2 (NEB) and 12 μL of water before denaturation at 95° C. for 5 minutes and re-annealing by temperature ramping from 95-85° C. at −2° C./s followed by ramping from 85-25° C. at −0.1° C./s. 1 μL of T7 Endonuclease I (NEB) was added to each re-annealed sample and cleavage reactions were incubated at 37° C. for 15 min. Reactions were stopped by adding 1 μL of Proteinase K (NEB) per sample and incubation at 25° C. for 5 min. Fragments were analysed on an AATI Fragment Analyzer (AATI) using the CRISPR Discovery Gel Kit reagents (AATI).

[0650] Genome editing outcomes were characterized by deep sequencing of PCR amplicons from targeted loci. Illumina sequencing libraries were constructed using the NEBNext® Ultra™ II DNA Library Prep Kit for Illumina® and NEBNext® Multiplex Oligos for Illumina® (96 Index Primers) (NEB) according to the manufacturer's suggestion. After sequencing, reads were examined for the presence of mutations at the expected site of cleavage by comparison to control experiments where RNPs targeted a different region of the genome.

[0651] FIG. 17 shows the results of selected Cas9 orthologs at the HEK cell WTAP locus, as compared to the activity of S. pyogenes Cas9, in cells transformed with a recombinant construct comprising a DNA sequence encoding the respective Cas9 ortholog.

[0652] FIG. 18 shows the results of selected Cas9 orthologs at the HEK cell RunX1 locus, as compared to the activity of S. pyogenes Cas9, in cells transformed with a recombinant construct comprising a DNA sequence encoding the respective Cas9 ortholog.

[0653] FIG. 20 shows the results of selected Cas9 orthologs at the HEK cell WTAP locus, as compared to the activity of S. pyogenes Cas9, in cells transformed with ribonucleoprotein comprising the respective Cas9 ortholog and its appropriate guide RNA.

### Example 9: Analysis of Cas9 Orthologs to Identify Key Residues, Predict Ortholog Activity, and Methods for Design of Variants

[0654] Amino acid residues that were conserved in active Cas9s and under-represented in non-active Cas9s were identified. This was accomplished by first aligning orthologs using MUSCLE (default parameters). Next, each position was parsed and the frequency of each amino acid at each position was assessed. Next, the overall fraction of each amino acid at each position in the active and non-active datasets were defined by summing and dividing by the total number in each dataset, respectively. Then, the non-active dataset was subtracted from the active with positive values indicating conserved amino acids in the active Cas9s that were under-represented in the non-active collection. Finally, key positions defining an active Cas9 were hand curated by selecting only those locations with a score greater than or equal to +0.4 where at least 5 of the 7 active Cas9s exhibited the conserved and under-represented amino acid (FIG. 21 and Table 86A).

[0655] After defining a set of structural features (“fingerprints”) for active Cas9s (all identified fingerprint positions listed in Table 86B), Cas9 orthologs were scored as summations of position scores. The maximum score of the method described herein was 12.52 and the minimum score was 0. After evaluating a diverse collection of Cas9s, scores ranged from 11.64 to 0.4. Many of the Cas9s experimentally determined to be active in eukaryotic cells were found to be in the top 8-10% of activity scores. All active Cas9 orthologs had at least one of the identified structural features. Table 86C shows the calculated activity categories for each of the Cas9 orthologs disclosed herein (by SEQID). Orthologs with a score greater than the median score (3.14) are predicted to have positive cutting activity in a eukaryotic cell. Other orthologs may have activity as well.

[0656] Using the methods described herein, the activity score, structural fingerprint, and category may be determined for any Cas9 ortholog. These or similar methods can be used to predict the activity of Cas9 orthologs, define key amino acids and structural features required for an active Cas9, define the residues responsible for sticky or blunt cleavage activity, and provide residues and regions for the generation of engineered variants.

[0657] Cas9 ortholog variants with different desired properties such as but not limited to: altered PAM recognition sequence, modified specificity, and/or altered cleavage activity may be engineered by analyzing the sequence-structure-function relationships of the Cas9 orthologs described herein. In some aspects, the evolution of functionally important domains (e.g., PI domains) is analyzed. In some aspects, information about conserved and non-conserved amino acids or amino acid motifs is utilized to predict activity of Cas9 orthologs and to design possible mutations in a Cas9 protein that may modulate activity or a molecular property. In some aspects, rational design is used. In some aspects, random mutagenesis is used. In some aspects, directed evolution is used. In some aspects, a combination of rational design, random mutagenesis, and directed evolution are used.

[0658] Following generation of variants, Cas9 ortholog variants are selected and tested to determine the PAM sequence, activity in cultured cells (e.g., human or plant), purified, and/or further characterized.

### Tables

TABLE 1
Cas9 orthologs selected for characterization

| NT | PRT | Ortholog | | |
|---|---|---|---|---|
| SEQID | SEQID | ID# | Clade | Source Organism |
| 1 | 86 | 2 | 1 | Prevotella histicola |
| 2 | 87 | 3 | 1 | Chryseobacterium gallinarum |
| 3 | 88 | 4 | 1 | Parabacteroides sp. |
| 4 | 89 | 5 | 1 | Capnocytophaga canis |
| 5 | 90 | 6 | 1 | Ornithobacterium rhinotracheale |
| 6 | 91 | 8 | 1 | Weeksella virosa |
| 7 | 92 | 9 | 1 | Flavobacterium frigidarium |
| 8 | 93 | 12 | 2 | Rikenellaceae sp. |
| 9 | 94 | 13 | 2 | Jejuia pallidilutea |
| 10 | 95 | 16 | 3 | Caenispirillum salinarum |
| 11 | 96 | 17 | 3 | Salinispira pacifica |
| 12 | 97 | 18 | 3 | Sulfitobacter donghicola |
| 13 | 98 | 19 | 3 | Mucispirillum schaedleri |
| 14 | 99 | 21 | 3 | Mesorhizobiumsp. |
| 15 | 100 | 27 | 5 | Neisseria meningitidis |
| 16 | 101 | 28 | 5 | Geobacillussp. |
| 17 | 102 | 29 | 5 | Bacillus okhensis |
| 18 | 103 | 30 | 5 | Tistrella mobilis |
| 19 | 104 | 32 | 5 | Kingella kingae |
| 20 | 105 | 33 | 5 | Clostridium perfringens |
| 21 | 106 | 35 | 5 | Neisseriasp. |
| 22 | 107 | 41 | 5 | Campylobacter coli |
| 23 | 108 | 43 | 5 | Sulfurospirillumsp. |
| 24 | 109 | 44 | 5 | Dechloromonas denitrificans |
| 25 | 110 | 46 | 6 | Nitratifractor salsuginis |
| 26 | 111 | 47 | 7 | Enterococcus cecorum |
| 27 | 112 | 48 | 7 | Facklamia hominis |
| 28 | 113 | 50 | 7 | Streptococcus sinensis |
| 29 | 114 | 51 | 7 | Eubacterium dolichum |
| 30 | 115 | 52 | 7 | Streptococcus macedonicus |
| 31 | 116 | 56 | 7 | Turicibactersp. |
| 32 | 117 | 60 | 7 | Bacillus niameyensis |
| 33 | 118 | 61 | 7 | Massilibacterium senegalense |
| 34 | 119 | 63 | 8 | Kurthia huakuii |
| 35 | 120 | 64 | 9 | Streptococcus equinus |
| 36 | 121 | 65 | 9 | Streptococcus equi |
| 37 | 122 | 66 | 9 | Enterococcus faecium |
| 38 | 123 | 67 | 9 | Enterococcus italicus |
| 39 | 124 | 68 | 9 | Streptococcus agalactiae |
| 40 | 125 | 70 | 9 | Streptococcus ratti |
| 41 | 126 | 71 | 9 | Listeria monocytogenes |
| 42 | 127 | 77 | 10 | Lactobacillussp. |
| 43 | 128 | 78 | 10 | Pediococcus acidilactici |
| 44 | 129 | 79 | 10 | Acidaminococcussp. |
| 45 | 130 | 80 | 10 | Lactobacillussp. |
| 46 | 131 | 81 | 10 | Treponema putidum |
| 47 | 132 | 87 | 10 | Eubacteriumsp. |
| 48 | 133 | 94 | 11 | Bifidobacterium bombi |
| 49 | 134 | 97 | 11 | Corynebacterium camporealensis |
| 50 | 135 | 102 | 12 | Legionella pneumophila |
| 51 | 136 | 83 | 1 | Environmental metagenome |
| 52 | 137 | 84 | 1 | Environmental metagenome |
| 53 | 138 | 85 | 5 | Environmental metagenome |
| 54 | 139 | 88 | 5 | Environmental metagenome |
| 55 | 140 | 91 | 3 | Environmental metagenome |
| 56 | 141 | 93 | 3 | Environmental metagenome |
| 57 | 142 | 139 | 3 | Environmental metagenome |
| 58 | 143 | 96 | 5 | Environmental metagenome |
| 59 | 144 | 98 | 3 | Environmental metagenome |
| 60 | 145 | 101 | 3 | Environmental metagenome |
| 61 | 146 | 103 | 2 | Environmental metagenome |
| 62 | 147 | 104 | 1 | Environmental metagenome |
| 63 | 148 | 105 | 2 | Environmental metagenome |
| 64 | 149 | 106 | 10 | Acidaminococcus_intestini_RyC-MR95 |
| 65 | 150 | 107 | 8 | Coriobacterium_glomerans_PW2 |
| 66 | 151 | 108 | 8 | Eggerthella_sp._YY7918 |
| 67 | 152 | 109 | 10 | Finegoldia_magna_ATCC_29328 |
| 68 | 153 | 112 | 10 | Lactobacillus_rhamnosus_LOCK900 |
| 69 | 154 | 116 | 7 | Mycoplasma_gallisepticum_CA06 |
| 70 | 155 | 119 | 9 | Streptococcus_agalactiae_NEM316 |
| 71 | 156 | 120 | 9 | Streptococcus_dysgalactiae_subsp._equisimilis_AC-2713 |
| 72 | 157 | 121 | 9 | Streptococcus_gallolyticus_subsp._gallolyticus_ATCC_43143 |
| 73 | 158 | 122 | 7 | Streptococcus_gordonii_str._Challis_substr._CH1 |
| 74 | 159 | 123 | 9 | Streptococcus_mutans_GS-5] |
| 75 | 160 | 124 | 7 | Streptococcus_salivarius_JIM8777 |
| 76 | 161 | 125 | 7 | Streptococcus_suis_D9 |
| 77 | 162 | 126 | 7 | Streptococcus_thermophilus_LMG_18311 |
| 78 | 163 | 127 | 10 | Treponema_denticola_ATCC_35405 |
| 79 | 164 | 131 | 9 | Lactobacillus animalis KCTC 3501 |
| 80 | 165 | 132 | 10 | Lactobacillus ceti DSM 22408 |
| 81 | 166 | 136 | 9 | Tissierellia bacterium KA00581 |
| 82 | 167 | 138 | 10 | Veillonella parvula ATCC 17745 |
| 83 | 168 | 141 | 7 | Streptococcus gallolyticus |
| 84 | 169 | 142 | 7 | Staphylococcus pasteuri |
| 85 | 170 | 140 | 9 | Enterococcus faecalis OG1RF |

SEQ IDs of the gene ORF and translated encoded protein, whole Cas9 protein phylogenetic clade, unique ID#, and source organism are listed.

TABLE 2A
Amino acid positions of Cas9 ortholog domains
The Cas9 orthologs were grouped by sequence similarities with the largest variation
at the REC domain. To determine the functional domain boundary, the Cas9 candidate
sequences of Group I, II, III, IV, V and VI were aligned with their closest
homologous sequences of known high resolution 3D structures, including
PDBID: 5czz, 5czz, 4un3, 4oge, 4oge, and 5b2o, respectively. Based on
these alignments, each candidate sequence was threaded into its
corresponding structural template for modeling, and the domain
boundaries were assigned according to the template's domain
definition in the associated publication references.

| | | | | | | | | | | |
|---|---|---|---|---|---|---|---|---|---|---|
| | PRT | RuvCI | RUVC1 | BH | BH | REC | REC | RuvCII | RUVCII | HNH |
| ID# | SEQID | start | end | start | end | start | end | start | end | start |

GROUP I

| | | | | | | | | | | |
|---|---|---|---|---|---|---|---|---|---|---|
| 12 | 93 | 1 | 41 | 42 | 81 | 82 | 518 | 519 | 622 | 623 |
| 18 | 97 | 1 | 40 | 41 | 78 | 79 | 458 | 459 | 558 | 559 |
| 19 | 98 | 1 | 48 | 49 | 86 | 87 | 448 | 449 | 548 | 549 |
| 21 | 99 | 1 | 51 | 52 | 89 | 90 | 503 | 504 | 605 | 606 |
| 27 | 100 | 1 | 51 | 52 | 89 | 90 | 458 | 459 | 538 | 539 |
| 28 | 101 | 1 | 39 | 40 | 77 | 78 | 456 | 457 | 534 | 535 |
| 29 | 102 | 1 | 50 | 51 | 88 | 89 | 462 | 463 | 541 | 542 |
| 30 | 103 | 1 | 47 | 48 | 85 | 86 | 450 | 451 | 538 | 539 |
| 32 | 104 | 1 | 48 | 49 | 86 | 87 | 457 | 458 | 537 | 538 |
| 33 | 105 | 1 | 43 | 44 | 81 | 82 | 455 | 456 | 535 | 536 |
| 35 | 106 | 1 | 48 | 49 | 86 | 87 | 461 | 462 | 541 | 542 |
| 41 | 107 | 1 | 36 | 37 | 74 | 75 | 439 | 440 | 521 | 522 |
| 43 | 108 | 1 | 45 | 46 | 82 | 83 | 453 | 454 | 537 | 538 |
| 44 | 109 | 1 | 39 | 40 | 77 | 78 | 474 | 475 | 570 | 571 |
| 46 | 110 | 1 | 46 | 47 | 85 | 86 | 487 | 488 | 572 | 573 |
| 47 | 111 | 1 | 42 | 43 | 76 | 77 | 462 | 463 | 543 | 544 |
| 48 | 112 | 1 | 37 | 38 | 71 | 72 | 466 | 467 | 549 | 550 |
| 50 | 113 | 1 | 39 | 40 | 73 | 74 | 462 | 463 | 542 | 543 |
| 51 | 114 | 1 | 39 | 40 | 73 | 74 | 434 | 435 | 513 | 514 |
| 52 | 115 | 1 | 40 | 41 | 74 | 75 | 461 | 462 | 542 | 543 |
| 56 | 116 | 1 | 38 | 39 | 72 | 73 | 449 | 450 | 530 | 531 |
| 60 | 117 | 1 | 41 | 42 | 75 | 76 | 451 | 452 | 530 | 531 |
| 61 | 118 | 1 | 40 | 41 | 73 | 74 | 437 | 438 | 518 | 519 |
| 83 | 136 | 1 | 58 | 59 | 100 | 101 | 456 | 457 | 515 | 516 |
| 84 | 137 | 1 | 44 | 45 | 88 | 89 | 622 | 623 | 674 | 675 |
| 85 | 138 | 1 | 42 | 43 | 83 | 84 | 456 | 457 | 515 | 516 |
| 88 | 139 | 1 | 39 | 40 | 77 | 78 | 447 | 448 | 502 | 503 |
| 91 | 140 | 1 | 43 | 44 | 87 | 88 | 482 | 483 | 558 | 559 |
| 93 | 141 | 1 | 43 | 44 | 81 | 82 | 463 | 464 | 526 | 527 |
| 139 | 142 | 1 | 39 | 40 | 82 | 83 | 600 | 601 | 653 | 654 |
| 96 | 143 | 1 | 45 | 46 | 83 | 84 | 450 | 451 | 508 | 509 |
| 98 | 144 | 1 | 47 | 48 | 85 | 86 | 472 | 473 | 549 | 550 |
| 101 | 145 | 1 | 42 | 43 | 80 | 81 | 448 | 449 | 505 | 506 |
| 103 | 146 | 1 | 41 | 42 | 79 | 80 | 451 | 452 | 502 | 503 |
| 105 | 148 | 1 | 45 | 46 | 87 | 88 | 511 | 512 | 571 | 572 |
| 122 | 158 | 1 | 40 | 41 | 73 | 74 | 459 | 460 | 514 | 515 |
| 124 | 160 | 1 | 40 | 41 | 73 | 74 | 466 | 467 | 521 | 522 |
| 125 | 161 | 1 | 41 | 42 | 74 | 75 | 460 | 461 | 515 | 516 |
| 126 | 162 | 1 | 40 | 41 | 73 | 74 | 460 | 461 | 515 | 516 |
| 141 | 168 | 1 | 41 | 42 | 74 | 75 | 460 | 461 | 515 | 516 |
| 142 | 169 | 1 | 41 | 42 | 74 | 75 | 430 | 431 | 485 | 486 |

GROUP II

| | | | | | | | | | | |
|---|---|---|---|---|---|---|---|---|---|---|
| 17 | 96 | 1 | 40 | 41 | 86 | 87 | 538 | 539 | 629 | 630 |

GROUP III

| | | | | | | | | | | |
|---|---|---|---|---|---|---|---|---|---|---|
| 2 | 86 | 1 | 58 | 59 | 94 | 95 | 637 | 638 | 692 | 693 |
| 3 | 87 | 1 | 59 | 60 | 96 | 97 | 653 | 654 | 707 | 708 |
| 4 | 88 | 1 | 58 | 59 | 94 | 95 | 669 | 670 | 724 | 725 |
| 5 | 89 | 1 | 58 | 59 | 94 | 95 | 672 | 673 | 733 | 734 |
| 6 | 90 | 1 | 59 | 60 | 94 | 95 | 695 | 696 | 755 | 756 |
| 8 | 91 | 1 | 58 | 59 | 92 | 93 | 703 | 704 | 763 | 764 |
| 9 | 92 | 1 | 58 | 59 | 93 | 94 | 612 | 613 | 674 | 675 |
| 13 | 94 | 1 | 47 | 48 | 82 | 83 | 722 | 723 | 783 | 784 |
| 63 | 119 | 1 | 44 | 45 | 77 | 78 | 719 | 720 | 774 | 775 |
| 64 | 120 | 1 | 59 | 60 | 94 | 95 | 716 | 717 | 772 | 773 |
| 65 | 121 | 1 | 59 | 60 | 94 | 95 | 715 | 716 | 771 | 772 |
| 66 | 122 | 1 | 59 | 60 | 94 | 95 | 728 | 729 | 784 | 785 |
| 67 | 123 | 1 | 59 | 60 | 94 | 95 | 720 | 721 | 776 | 777 |
| 68 | 124 | 1 | 59 | 60 | 94 | 95 | 731 | 732 | 787 | 788 |
| 70 | 125 | 1 | 59 | 60 | 94 | 95 | 720 | 721 | 776 | 777 |
| 71 | 126 | 1 | 76 | 77 | 105 | 106 | 730 | 731 | 786 | 787 |
| 77 | 127 | 1 | 50 | 51 | 85 | 86 | 729 | 730 | 785 | 786 |
| 78 | 128 | 1 | 48 | 49 | 83 | 84 | 729 | 730 | 784 | 785 |
| 79 | 129 | 1 | 47 | 48 | 82 | 83 | 725 | 726 | 781 | 782 |
| 80 | 130 | 1 | 50 | 51 | 85 | 86 | 747 | 748 | 804 | 805 |
| 81 | 131 | 1 | 50 | 51 | 85 | 86 | 744 | 745 | 800 | 801 |
| 87 | 132 | 1 | 53 | 54 | 88 | 89 | 727 | 728 | 784 | 785 |
| 104 | 147 | 1 | 44 | 45 | 88 | 89 | 646 | 647 | 713 | 714 |
| 106 | 149 | 1 | 46 | 47 | 77 | 78 | 715 | 716 | 777 | 778 |
| 107 | 150 | 1 | 51 | 52 | 82 | 83 | 757 | 758 | 817 | 818 |
| 108 | 151 | 1 | 50 | 51 | 81 | 82 | 754 | 755 | 813 | 814 |
| 109 | 152 | 1 | 48 | 49 | 79 | 80 | 726 | 727 | 786 | 787 |
| 112 | 153 | 1 | 49 | 50 | 80 | 81 | 720 | 721 | 782 | 783 |
| 116 | 154 | 1 | 49 | 50 | 78 | 79 | 529 | 530 | 588 | 589 |
| 119 | 155 | 1 | 47 | 48 | 89 | 90 | 707 | 708 | 766 | 767 |
| 120 | 156 | 1 | 58 | 59 | 89 | 90 | 708 | 709 | 767 | 768 |
| 121 | 157 | 1 | 59 | 60 | 91 | 92 | 710 | 711 | 769 | 770 |
| 123 | 159 | 1 | 58 | 59 | 89 | 90 | 709 | 710 | 768 | 769 |
| 127 | 163 | 1 | 49 | 50 | 80 | 81 | 733 | 734 | 796 | 797 |
| 131 | 164 | 1 | 63 | 64 | 94 | 95 | 708 | 709 | 767 | 768 |
| 132 | 165 | 1 | 51 | 52 | 82 | 83 | 743 | 744 | 806 | 807 |
| 136 | 166 | 1 | 50 | 51 | 81 | 82 | 725 | 726 | 786 | 787 |
| 138 | 167 | 1 | 63 | 64 | 94 | 95 | 747 | 748 | 809 | 810 |
| 140 | 170 | 1 | 58 | 59 | 89 | 90 | 720 | 721 | 779 | 780 |

GROUP IV

| | | | | | | | | | | |
|---|---|---|---|---|---|---|---|---|---|---|
| 94 | 133 | 1 | 49 | 50 | 96 | 97 | 532 | 533 | 579 | 580 |
| 97 | 134 | 1 | 41 | 42 | 88 | 89 | 470 | 471 | 517 | 518 |

GROUP V

| | | | | | | | | | | |
|---|---|---|---|---|---|---|---|---|---|---|
| 16 | 95 | 1 | 44 | 45 | 96 | 97 | 606 | 607 | 661 | 662 |

GROUP VI

| | | | | | | | | | | |
|---|---|---|---|---|---|---|---|---|---|---|
| 102 | 135 | 1 | 52 | 53 | 86 | 87 | 626 | 627 | 685 | 686 |

| | PRT | HNH | RUVCIII | RUVCIII | WED | WED | PI | PI |
|---|---|---|---|---|---|---|---|---|
| ID# | SEQID | end | start | end | start | end | start | end |
| GROUP I | | | | | | | | |
| 12 | 93 | 758 | 759 | 929 | 930 | 1035 | 1036 | 1053 |
| 18 | 97 | 681 | 682 | 824 | 825 | 925 | 926 | 1071 |
| 19 | 98 | 680 | 681 | 813 | 814 | 895 | 896 | 1044 |
| 21 | 99 | 743 | 744 | 887 | 888 | 946 | 947 | 1118 |
| 27 | 100 | 660 | 661 | 831 | 832 | 950 | 951 | 1082 |
| 28 | 101 | 656 | 657 | 804 | 805 | 925 | 926 | 1087 |
| 29 | 102 | 670 | 671 | 814 | 815 | 932 | 933 | 1074 |
| 30 | 103 | 662 | 663 | 819 | 820 | 900 | 901 | 1049 |
| 32 | 104 | 659 | 660 | 814 | 815 | 924 | 925 | 1060 |
| 33 | 105 | 655 | 656 | 823 | 824 | 938 | 839 | 1065 |
| 35 | 106 | 666 | 667 | 816 | 817 | 931 | 932 | 1069 |
| 41 | 107 | 638 | 639 | 784 | 785 | 837 | 838 | 1001 |
| 43 | 108 | 657 | 658 | 796 | 797 | 853 | 854 | 1048 |
| 44 | 109 | 697 | 698 | 863 | 864 | 981 | 982 | 1115 |
| 46 | 110 | 689 | 690 | 836 | 837 | 967 | 968 | 1137 |
| 47 | 111 | 683 | 684 | 824 | 825 | 973 | 974 | 1134 |
| 48 | 112 | 681 | 682 | 830 | 831 | 991 | 992 | 1142 |
| 50 | 113 | 677 | 678 | 822 | 823 | 966 | 967 | 1122 |
| 51 | 114 | 646 | 647 | 783 | 784 | 933 | 934 | 1091 |
| 52 | 115 | 677 | 678 | 823 | 824 | 968 | 969 | 1130 |
| 56 | 116 | 667 | 668 | 806 | 807 | 950 | 951 | 1107 |
| 60 | 117 | 662 | 663 | 799 | 800 | 926 | 927 | 1064 |
| 61 | 118 | 643 | 644 | 787 | 788 | 913 | 914 | 1063 |
| 83 | 136 | 679 | 680 | 792 | 793 | 905 | 906 | 1039 |
| 84 | 137 | 834 | 835 | 978 | 979 | 1200 | 1201 | 1354 |
| 85 | 138 | 677 | 678 | 791 | 792 | 830 | 831 | 972 |
| 88 | 139 | 662 | 663 | 788 | 789 | 899 | 900 | 1046 |
| 91 | 140 | 715 | 716 | 842 | 843 | 964 | 965 | 1094 |
| 93 | 141 | 688 | 689 | 806 | 807 | 919 | 920 | 1037 |
| 139 | 142 | 822 | *1150 | 1228 | 1229 | 1392 | 1393 | 1525 |
| 96 | 143 | 670 | 671 | 788 | 789 | 843 | 844 | 978 |
| 98 | 144 | 718 | 719 | 831 | 832 | 903 | 904 | 1037 |
| 101 | 145 | 674 | 675 | 789 | 780 | 908 | 909 | 1028 |
| 103 | 146 | 658 | 659 | 770 | 771 | 884 | 885 | 1008 |
| 105 | 148 | 735 | 736 | 846 | 847 | 997 | 998 | 1124 |
| 122 | 158 | 687 | 688 | 814 | 815 | 963 | 964 | 1136 |
| 124 | 160 | 694 | 695 | 819 | 820 | 969 | 970 | 1127 |
| 125 | 161 | 688 | 689 | 816 | 817 | 963 | 964 | 1122 |
| 126 | 162 | 688 | 689 | 813 | 814 | 964 | 965 | 1122 |
| 141 | 168 | 688 | 689 | 816 | 817 | 967 | 968 | 1130 |
| 142 | 169 | 652 | 653 | 774 | 775 | 909 | 910 | 1054 |
| GROUP II | | | | | | | | |
| 17 | 96 | 751 | 752 | 1208 | 1209 | 1322 | 1323 | 1458 |
| GROUP III | | | | | | | | |
| 2 | 86 | 852 | 853 | 1053 | 1054 | 1126 | 1127 | 1380 |
| 3 | 87 | 866 | 867 | 1014 | 1015 | 1147 | 1148 | 1403 |
| 4 | 88 | 881 | 882 | 1082 | 1083 | 1155 | 1156 | 1424 |
| 5 | 89 | 893 | 894 | 1099 | 1100 | 1172 | 1173 | 1430 |
| 6 | 90 | 962 | 963 | 1190 | 1191 | 1268 | 1269 | 1535 |
| 8 | 91 | 967 | 968 | 1189 | 1190 | 1208 | 1209 | 1440 |
| 9 | 92 | 829 | 830 | 1027 | 1028 | 1100 | 1101 | 1345 |
| 13 | 94 | 937 | 938 | 1104 | 1105 | 1167 | 1168 | 1459 |
| 63 | 119 | 930 | 931 | 1070 | 1071 | 1090 | 1091 | 1368 |
| 64 | 120 | 930 | 931 | 1112 | 1113 | 1156 | 1157 | 1375 |
| 65 | 121 | 922 | 923 | 1083 | 1084 | 1120 | 1121 | 1348 |
| 66 | 122 | 932 | 933 | 1090 | 1091 | 1127 | 1128 | 1340 |
| 67 | 123 | 924 | 925 | 1078 | 1079 | 1115 | 1116 | 1330 |
| 68 | 124 | 942 | 943 | 1078 | 1079 | 1115 | 1116 | 1330 |
| 70 | 125 | 928 | 929 | 1101 | 1102 | 1138 | 1139 | 1370 |
| 71 | 126 | 937 | 938 | 1095 | 1096 | 1132 | 1133 | 1345 |
| 77 | 127 | 939 | 940 | 1081 | 1082 | 1124 | 1125 | 1365 |
| 78 | 128 | 938 | 939 | 1088 | 1089 | 1125 | 1126 | 1366 |
| 79 | 129 | 939 | 940 | 1068 | 1069 | 1103 | 1104 | 1358 |
| 80 | 130 | 967 | 968 | 1126 | 1127 | 1168 | 1169 | 1396 |
| 81 | 131 | 961 | 962 | 1096 | 1097 | 1159 | 1160 | 1395 |
| 87 | 132 | 946 | 947 | 1079 | 1080 | 1130 | 1131 | 1345 |
| 104 | 147 | 881 | 882 | 1039 | 1040 | 1253 | 1254 | 1399 |
| 106 | 149 | 941 | 942 | 1062 | 1063 | 1104 | 1105 | 1358 |
| 107 | 150 | 977 | 978 | 1124 | 1125 | 1169 | 1170 | 1384 |
| 108 | 151 | 970 | 971 | 1120 | 1121 | 1165 | 1166 | 1380 |
| 109 | 152 | 954 | 955 | 1079 | 1080 | 1129 | 1130 | 1348 |
| 112 | 153 | 941 | 942 | 1075 | 1076 | 1125 | 1126 | 1361 |
| 116 | 154 | 766 | 767 | 913 | 914 | 1102 | 1103 | 1269 |
| 119 | 155 | 930 | 931 | 1102 | 1103 | 1149 | 1150 | 1377 |
| 120 | 156 | 924 | 925 | 1096 | 1097 | 1140 | 1141 | 1371 |
| 121 | 157 | 933 | 934 | 1102 | 1103 | 1149 | 1150 | 1371 |
| 123 | 159 | 925 | 926 | 1076 | 1077 | 1123 | 1124 | 1345 |
| 127 | 163 | 963 | 964 | 1091 | 1090 | 1135 | 1136 | 1395 |
| 131 | 164 | 921 | 922 | 1065 | 1066 | 1109 | 1110 | 1318 |
| 132 | 165 | 968 | 969 | 1099 | 1100 | 1150 | 1151 | 1395 |
| 136 | 166 | 952 | 953 | 1089 | 1090 | 1149 | 1150 | 1400 |
| 138 | 167 | 979 | 980 | 1105 | 1106 | 1158 | 1159 | 1398 |
| 140 | 170 | 936 | 937 | 1081 | 1082 | 1125 | 1126 | 1337 |
| GROUP IV | | | | | | | | |
| 94 | 133 | 726 | 727 | 909 | 910 | 1025 | 1026 | 1239 |
| 97 | 134 | 672 | 673 | 820 | 821 | 913 | 914 | 1095 |
| GROUP V | | | | | | | | |
| 16 | 95 | 844 | 845 | 1000 | 1001 | 1103 | 1104 | 1442 |
| GROUP VI | | | | | | | | |
| 102 | 135 | 842 | 843 | 954 | 955 | 1184 | 1185 | 1372 |

*indicates an unstructured insertion between the HNH and RuvCIII domains.

TABLE 2B
SEQ IDs for domains of selected Cas9 orthologs

| Cas9 | REC | RUVC1 | RUVC2 | RUVC3 | HNH | WED | PI |
|---|---|---|---|---|---|---|---|
| Ortholog | domain | domain | domain | domain | domain | domain | domain |
| ID | SEQID | SEQID | SEQID | SEQID | SEQID | SEQID | SEQID |
| 2 | 1136 | 1221 | 1306 | 1391 | 1476 | 1561 | 1646 |
| 3 | 1137 | 1222 | 1307 | 1392 | 1477 | 1562 | 1647 |
| 4 | 1138 | 1223 | 1308 | 1393 | 1478 | 1563 | 1648 |
| 5 | 1139 | 1224 | 1309 | 1394 | 1479 | 1564 | 1649 |
| 6 | 1140 | 1225 | 1310 | 1395 | 1480 | 1565 | 1650 |
| 8 | 1141 | 1226 | 1311 | 1396 | 1481 | 1566 | 1651 |
| 9 | 1142 | 1227 | 1312 | 1397 | 1482 | 1567 | 1652 |
| 12 | 1143 | 1228 | 1313 | 1398 | 1483 | 1568 | 1653 |
| 13 | 1144 | 1229 | 1314 | 1399 | 1484 | 1569 | 1654 |
| 16 | 1145 | 1230 | 1315 | 1400 | 1485 | 1570 | 1655 |
| 17 | 1146 | 1231 | 1316 | 1401 | 1486 | 1571 | 1656 |
| 18 | 1147 | 1232 | 1317 | 1402 | 1487 | 1572 | 1657 |
| 19 | 1148 | 1233 | 1318 | 1403 | 1488 | 1573 | 1658 |
| 21 | 1149 | 1234 | 1319 | 1404 | 1489 | 1574 | 1659 |
| 27 | 1150 | 1235 | 1320 | 1405 | 1490 | 1575 | 1660 |
| 28 | 1151 | 1236 | 1321 | 1406 | 1491 | 1576 | 1661 |
| 29 | 1152 | 1237 | 1322 | 1407 | 1492 | 1577 | 1662 |
| 30 | 1153 | 1238 | 1323 | 1408 | 1493 | 1578 | 1663 |
| 32 | 1154 | 1239 | 1324 | 1409 | 1494 | 1579 | 1664 |
| 33 | 1155 | 1240 | 1325 | 1410 | 1495 | 1580 | 1665 |
| 35 | 1156 | 1241 | 1326 | 1411 | 1496 | 1581 | 1666 |
| 41 | 1157 | 1242 | 1327 | 1412 | 1497 | 1582 | 1667 |
| 43 | 1158 | 1243 | 1328 | 1413 | 1498 | 1583 | 1668 |
| 44 | 1159 | 1244 | 1329 | 1414 | 1499 | 1584 | 1669 |
| 46 | 1160 | 1245 | 1330 | 1415 | 1500 | 1585 | 1670 |
| 47 | 1161 | 1246 | 1331 | 1416 | 1501 | 1586 | 1671 |
| 48 | 1162 | 1247 | 1332 | 1417 | 1502 | 1587 | 1672 |
| 50 | 1163 | 1248 | 1333 | 1418 | 1503 | 1588 | 1673 |
| 51 | 1164 | 1249 | 1334 | 1419 | 1504 | 1589 | 1674 |
| 52 | 1165 | 1250 | 1335 | 1420 | 1505 | 1590 | 1675 |
| 56 | 1166 | 1251 | 1336 | 1421 | 1506 | 1591 | 1676 |
| 60 | 1167 | 1252 | 1337 | 1422 | 1507 | 1592 | 1677 |
| 61 | 1168 | 1253 | 1338 | 1423 | 1508 | 1593 | 1678 |
| 63 | 1169 | 1254 | 1339 | 1424 | 1509 | 1594 | 1679 |
| 64 | 1170 | 1255 | 1340 | 1425 | 1510 | 1595 | 1680 |
| 65 | 1171 | 1256 | 1341 | 1426 | 1511 | 1596 | 1681 |
| 66 | 1172 | 1257 | 1342 | 1427 | 1512 | 1597 | 1682 |
| 67 | 1173 | 1258 | 1343 | 1428 | 1513 | 1598 | 1683 |
| 68 | 1174 | 1259 | 1344 | 1429 | 1514 | 1599 | 1684 |
| 70 | 1175 | 1260 | 1345 | 1430 | 1515 | 1600 | 1685 |
| 71 | 1176 | 1261 | 1346 | 1431 | 1516 | 1601 | 1686 |
| 77 | 1177 | 1262 | 1347 | 1432 | 1517 | 1602 | 1687 |
| 78 | 1178 | 1263 | 1348 | 1433 | 1518 | 1603 | 1688 |
| 79 | 1179 | 1264 | 1349 | 1434 | 1519 | 1604 | 1689 |
| 80 | 1180 | 1265 | 1350 | 1435 | 1520 | 1605 | 1690 |
| 81 | 1181 | 1266 | 1351 | 1436 | 1521 | 1606 | 1691 |
| 83 | 1182 | 1267 | 1352 | 1437 | 1522 | 1607 | 1692 |
| 84 | 1183 | 1268 | 1353 | 1438 | 1523 | 1608 | 1693 |
| 85 | 1184 | 1269 | 1354 | 1439 | 1524 | 1609 | 1694 |
| 87 | 1185 | 1270 | 1355 | 1440 | 1525 | 1610 | 1695 |
| 88 | 1186 | 1271 | 1356 | 1441 | 1526 | 1611 | 1696 |
| 91 | 1187 | 1272 | 1357 | 1442 | 1527 | 1612 | 1697 |
| 93 | 1188 | 1273 | 1358 | 1443 | 1528 | 1613 | 1698 |
| 94 | 1189 | 1274 | 1359 | 1444 | 1529 | 1614 | 1699 |
| 96 | 1190 | 1275 | 1360 | 1445 | 1530 | 1615 | 1700 |
| 97 | 1191 | 1276 | 1361 | 1446 | 1531 | 1616 | 1701 |
| 98 | 1192 | 1277 | 1362 | 1447 | 1532 | 1617 | 1702 |
| 101 | 1193 | 1278 | 1363 | 1448 | 1533 | 1618 | 1703 |
| 102 | 1194 | 1279 | 1364 | 1449 | 1534 | 1619 | 1704 |
| 103 | 1195 | 1280 | 1365 | 1450 | 1535 | 1620 | 1705 |
| 104 | 1196 | 1281 | 1366 | 1451 | 1536 | 1621 | 1706 |
| 105 | 1197 | 1282 | 1367 | 1452 | 1537 | 1622 | 1707 |
| 106 | 1198 | 1283 | 1368 | 1453 | 1538 | 1623 | 1708 |
| 107 | 1199 | 1284 | 1369 | 1454 | 1539 | 1624 | 1709 |
| 108 | 1200 | 1285 | 1370 | 1455 | 1540 | 1625 | 1710 |
| 109 | 1201 | 1286 | 1371 | 1456 | 1541 | 1626 | 1711 |
| 112 | 1202 | 1287 | 1372 | 1457 | 1542 | 1627 | 1712 |
| 116 | 1203 | 1288 | 1373 | 1458 | 1543 | 1628 | 1713 |
| 119 | 1204 | 1289 | 1374 | 1459 | 1544 | 1629 | 1714 |
| 120 | 1205 | 1290 | 1375 | 1460 | 1545 | 1630 | 1715 |
| 121 | 1206 | 1291 | 1376 | 1461 | 1546 | 1631 | 1716 |
| 122 | 1207 | 1292 | 1377 | 1462 | 1547 | 1632 | 1717 |
| 123 | 1208 | 1293 | 1378 | 1463 | 1548 | 1633 | 1718 |
| 124 | 1209 | 1294 | 1379 | 1464 | 1549 | 1634 | 1719 |
| 125 | 1210 | 1295 | 1380 | 1465 | 1550 | 1635 | 1720 |
| 126 | 1211 | 1296 | 1381 | 1466 | 1551 | 1636 | 1721 |
| 127 | 1212 | 1297 | 1382 | 1467 | 1552 | 1637 | 1722 |
| 131 | 1213 | 1298 | 1383 | 1468 | 1553 | 1638 | 1723 |
| 132 | 1214 | 1299 | 1384 | 1469 | 1554 | 1639 | 1724 |
| 136 | 1215 | 1300 | 1385 | 1470 | 1555 | 1640 | 1725 |
| 138 | 1216 | 1301 | 1386 | 1471 | 1556 | 1641 | 1726 |
| 139 | 1217 | 1302 | 1387 | 1472 | 1557 | 1642 | 1727 |
| 140 | 1218 | 1303 | 1388 | 1473 | 1558 | 1643 | 1728 |
| 141 | 1219 | 1304 | 1389 | 1474 | 1559 | 1644 | 1729 |
| 142 | 1220 | 1305 | 1390 | 1475 | 1560 | 1645 | 1730 |

TABLE 3
Examples of sgRNA solutions and their components (VT, crRNA repeat,
loop, anti-repeat and 3′ tracrRNA) for some of the Cas9 orthologs
described herein
As described herein, the variable targeting domain of a sgRNA can vary
for example, but not limiting from at least 12 to 30 nucleotides. As
described herein, the length of the loop between the crRNA and the
anti-repeat can vary from at least 3 nucleotides to 100 nucleotides.

| | | | | | | | sgRNA |
|---|---|---|---|---|---|---|---|
| | | ORF | | crRNA | anti- | 3′ | (CER |
| | | DNA | PRT | repeat | repeat | tracrRNA | domain) |
| ID# | Clade | SEQID | SEQID | SEQID | SEQID | SEQID | SEQID |
| 2 | 1 | 1 | 86 | 171 | 256 | 341 | 426 |
| 3 | 1 | 2 | 87 | 172 | 257 | 342 | 427 |
| 4 | 1 | 3 | 88 | 173 | 258 | 343 | 428 |
| 5 | 1 | 4 | 89 | 174 | 259 | 344 | 429 |
| 6 | 1 | 5 | 90 | 175 | 260 | 345 | 430 |
| 8 | 1 | 6 | 91 | 176 | 261 | 346 | 431 |
| 9 | 1 | 7 | 92 | 177 | 262 | 347 | 432 |
| 12 | 2 | 8 | 93 | 178 | 263 | 348 | 433 |
| 13 | 2 | 9 | 94 | 179 | 264 | 349 | 434 |
| 16 | 3 | 10 | 95 | 180 | 265 | 350 | 435 |
| 17 | 3 | 11 | 96 | 181 | 266 | 351 | 436 |
| 18 | 3 | 12 | 97 | 182 | 267 | 352 | 437 |
| 19 | 3 | 13 | 98 | 183 | 268 | 353 | 438 |
| 21 | 3 | 14 | 99 | 184 | 269 | 354 | 439 |
| 27 | 5 | 15 | 100 | 185 | 270 | 355 | 440 |
| 28 | 5 | 16 | 101 | 186 | 271 | 356 | 441 |
| 29 | 5 | 17 | 102 | 187 | 272 | 357 | 442 |
| 30 | 5 | 18 | 103 | 188 | 273 | 358 | 443 |
| 32 | 5 | 19 | 104 | 189 | 274 | 359 | 444 |
| 33 | 5 | 20 | 105 | 190 | 275 | 360 | 445 |
| 35 | 5 | 21 | 106 | 191 | 276 | 361 | 446 |
| 41 | 5 | 22 | 107 | 192 | 277 | 362 | 447 |
| 43 | 5 | 23 | 108 | 193 | 278 | 363 | 448 |
| 44 | 5 | 24 | 109 | 194 | 279 | 364 | 449 |
| 46 | 6 | 25 | 110 | 195 | 280 | 365 | 450 |
| 47 | 7 | 26 | 111 | 196 | 281 | 366 | 451 |
| 48 | 7 | 27 | 112 | 197 | 282 | 367 | 452 |
| 50 | 7 | 28 | 113 | 198 | 283 | 368 | 453 |
| 51 | 7 | 29 | 114 | 199 | 284 | 369 | 454 |
| 52 | 7 | 30 | 115 | 200 | 285 | 370 | 455 |
| 56 | 7 | 31 | 116 | 201 | 286 | 371 | 456 |
| 60 | 7 | 32 | 117 | 202 | 287 | 372 | 457 |
| 61 | 7 | 33 | 118 | 203 | 288 | 373 | 458 |
| 63 | 8 | 34 | 119 | 204 | 289 | 374 | 459 |
| 64 | 9 | 35 | 120 | 205 | 290 | 375 | 460 |
| 65 | 9 | 36 | 121 | 206 | 291 | 376 | 461 |
| 66 | 9 | 37 | 122 | 207 | 292 | 377 | 462 |
| 67 | 9 | 38 | 123 | 208 | 293 | 378 | 463 |
| 68 | 9 | 39 | 124 | 209 | 294 | 379 | 464 |
| 70 | 9 | 40 | 125 | 210 | 295 | 380 | 465 |
| 71 | 9 | 41 | 126 | 211 | 296 | 381 | 466 |
| 77 | 10 | 42 | 127 | 212 | 297 | 382 | 467 |
| 78 | 10 | 43 | 128 | 213 | 298 | 383 | 468 |
| 79 | 10 | 44 | 129 | 214 | 299 | 384 | 469 |
| 80 | 10 | 45 | 130 | 215 | 300 | 385 | 470 |
| 81 | 10 | 46 | 131 | 216 | 301 | 386 | 471 |
| 87 | 10 | 47 | 132 | 217 | 302 | 387 | 472 |
| 94 | 11 | 48 | 133 | 218 | 303 | 388 | 473 |
| 97 | 11 | 49 | 134 | 219 | 304 | 389 | 474 |
| 102 | 12 | 50 | 135 | 220 | 305 | 390 | 475 |
| 83 | 1 | 51 | 136 | 221 | 306 | 391 | 476 |
| 84 | 1 | 52 | 137 | 222 | 307 | 392 | 477 |
| 85 | 5 | 53 | 138 | 223 | 308 | 393 | 478 |
| 88 | 5 | 54 | 139 | 224 | 309 | 394 | 479 |
| 91 | 3 | 55 | 140 | 225 | 310 | 395 | 480 |
| 93 | 3 | 56 | 141 | 226 | 311 | 396 | 481 |
| 139 | 3 | 57 | 142 | 227 | 312 | 397 | 482 |
| 96 | 5 | 58 | 143 | 228 | 313 | 398 | 483 |
| 98 | 3 | 59 | 144 | 229 | 314 | 399 | 484 |
| 101 | 3 | 60 | 145 | 230 | 315 | 400 | 485 |
| 103 | 2 | 61 | 146 | 231 | 316 | 401 | 486 |
| 104 | 1 | 62 | 147 | 232 | 317 | 402 | 487 |
| 105 | 2 | 63 | 148 | 233 | 318 | 403 | 488 |
| 106 | 10 | 64 | 149 | 234 | 319 | 404 | 489 |
| 107 | 8 | 65 | 150 | 235 | 320 | 405 | 490 |
| 108 | 8 | 66 | 151 | 236 | 321 | 406 | 491 |
| 109 | 10 | 67 | 152 | 237 | 322 | 407 | 492 |
| 112 | 10 | 68 | 153 | 238 | 323 | 408 | 493 |
| 116 | 7 | 69 | 154 | 239 | 324 | 409 | 494 |
| 119 | 9 | 70 | 155 | 240 | 325 | 410 | 495 |
| 120 | 9 | 71 | 156 | 241 | 326 | 411 | 496 |
| 121 | 9 | 72 | 157 | 242 | 327 | 412 | 497 |
| 122 | 7 | 73 | 158 | 243 | 328 | 413 | 498 |
| 123 | 9 | 74 | 159 | 244 | 329 | 414 | 499 |
| 124 | 7 | 75 | 160 | 245 | 330 | 415 | 500 |
| 125 | 7 | 76 | 161 | 246 | 331 | 416 | 501 |
| 126 | 7 | 77 | 162 | 247 | 332 | 417 | 502 |
| 127 | 10 | 78 | 163 | 248 | 333 | 418 | 503 |
| 131 | 9 | 79 | 164 | 249 | 334 | 419 | 504 |
| 132 | 10 | 80 | 165 | 250 | 335 | 420 | 505 |
| 136 | 9 | 81 | 166 | 251 | 336 | 421 | 506 |
| 138 | 10 | 82 | 167 | 252 | 337 | 422 | 507 |
| 141 | 7 | 83 | 168 | 253 | 338 | 423 | 508 |
| 142 | 7 | 84 | 169 | 254 | 339 | 424 | 509 |
| 140 | 9 | 85 | 170 | 255 | 340 | 425 | 510 |

TABLE 4
Protospacer adjacent motif (PAM) preferences for ID2 Clade 1
Displayed as a position frequency matrix (PFM). Numbers in
brackets [x] represent strong PAM preferences, numbers
in slashes /x/ represent weak PAM preferences.

| | | PAM Position | | | | | | |
|---|---|---|---|---|---|---|---|---|
| | | 1 | 2 | 3 | 4 | 5 | 6 | 7 |
| Nucleotide | G | 36.14% | 21.25% | [54.36%] | 0.16% | 0% | [91.52%] | 7.65% |
| | A | 7.44% | [78.48%] | /45.64%/ | /46.12%/ | /48.14%/ | 3.33% | 6.68% |
| | T | 24.12% | 0% | 0% | /46.68%/ | 34.78% | 3.08% | 28.66% |
| | C | 32.30% | 0.27% | 0% | 7.04% | 17.07% | 2.07% | /57.01%/ |
| Consensus | | N | A | R | W | H | G | N |
| | | | | (G > A) | | (A > T > C) | | (C > T > R) |

TABLE 5
Protospacer adjacent motif (PAM) preferences for ID3 Clade 1
Displayed as a position frequency matrix (PFM). Numbers in
brackets [x] represent strong PAM preferences, numbers
in slashes /x/ represent weak PAM preferences.

| | | PAM Position | | | | | | |
|---|---|---|---|---|---|---|---|---|
| | | 1 | 2 | 3 | 4 | 5 | 6 | 7 |
| Nucleotide | G | 28.58% | 23.58% | [55.97%] | 1.33% | 0.02% | 1.83% | 16.89% |
| | A | 10.31% | /57.81%/ | /40.56%/ | 11.2% | 2.37% | 0.26% | 24.79% |
| | T | 13.88% | 2.88% | 0% | [77.09%] | [81.69%] | [85.73%] | /42.4%/ |
| | C | /47.23%/ | 15.73% | 3.47% | 10.38% | 15.93% | 12.18% | 15.92% |
| Consensus | | N | V | R | T | T | T | N |
| | | (C > D) | (A > S) | (G > A) | | | | (T > V) |

TABLE 6
Protospacer adjacent motif (PAM) preferences for ID4 Clade 1
Displayed as a position frequency matrix (PFM). Numbers in
brackets [x] represent strong PAM preferences, numbers
in slashes /x/ represent weak PAM preferences.

| | | PAM Position | | | | | | |
|---|---|---|---|---|---|---|---|---|
| | | 1 | 2 | 3 | 4 | 5 | 6 | 7 |
| Nucleotide | G | 30.63% | 33.91% | 9.17% | 0.12% | 0.19% | 0.08% | 8.43% |
| | A | 15.52% | /53.21%/ | 20.43% | 5.77% | 4.39% | 0.43% | 6.52% |
| | T | 22.02% | 3.04% | [60.65%] | [85.47%] | [72.35%] | [90.08%] | [73.38%] |
| | C | 31.83% | 9.84% | 9.75% | 8.64% | 23.07% | 9.4% | 11.67% |
| Consensus | | N | V | T | T | T | T | T |
| | | | (A > G > C) | | | | | |

TABLE 7
Protospacer adjacent motif (PAM) preferences for ID5 Clade 1
Displayed as a position frequency matrix (PFM). Numbers in
brackets [x] represent strong PAM preferences, numbers
in slashes /x/ represent weak PAM preferences.

| | | PAM Position | | | | | | |
|---|---|---|---|---|---|---|---|---|
| | | 1 | 2 | 3 | 4 | 5 | 6 | 7 |
| Nucleotide | G | 30.31% | 31.67% | 7.44% | 0.01% | 0.01% | 0% | 4.94% |
| | A | 17.59% | [60.32%] | 19.98% | 2.08% | 1.74% | 0.09% | 4.29% |
| | T | 28.33% | 1.01% | [63.72%] | [93.23%] | [90.31%] | [97.29%] | [83.28%] |
| | C | 23.77% | 7% | 8.86% | 4.68% | 7.94% | 2.62% | 7.48% |
| Consensus | | N | A | T | T | T | T | T |

TABLE 8
Protospacer adjacent motif (PAM) preferences for ID6 Clade 1
Displayed as a position frequency matrix (PFM). Numbers in
brackets [x] represent strong PAM preferences, numbers
in slashes /x/ represent weak PAM preferences.

| | | PAM Position | | | | | | |
|---|---|---|---|---|---|---|---|---|
| | | 1 | 2 | 3 | 4 | 5 | 6 | 7 |
| Nucleotide | G | 24.08% | 8.85% | 9.57% | 6.63% | 10.8% | /52.38%/ | 26.21% |
| | A | 20.44% | 33.32% | [89.83%] | [82.42%] | [61.84%] | 35.19% | 25.1% |
| | T | 18.01% | 26.95% | 0.56% | 0% | 8.44% | 5.22% | 22.01% |
| | C | 37.48% | 30.88% | 0.05% | 10.95% | 18.91% | 7.21% | 26.68% |
| Consensus | | N | N | A | A | A | N | N |
| | | | (H > G) | | | | (G > A > Y) | |

TABLE 9
Protospacer adjacent motif (PAM) preferences for ID8 Clade 1
Displayed as a position frequency matrix (PFM). Numbers in
brackets [x] represent strong PAM preferences, numbers
in slashes /x/ represent weak PAM preferences.

| | | PAM Position | | | | | | |
|---|---|---|---|---|---|---|---|---|
| | | 1 | 2 | 3 | 4 | 5 | 6 | 7 |
| Nucleotide | G | 10.17% | 6.73% | 0.89% | 1.22% | 2.56% | 3.05% | 22.15% |
| | A | 23.01% | 27.71% | [99.11%] | [98.51%] | [94.16%] | 4.91% | 37.94% |
| | T | /42.68%/ | 33.86% | 0% | 0.24% | 0.13% | [86.66%] | 26.05% |
| | C | 24.14% | 31.70% | 0% | 0.03% | 3.15% | 5.37% | 13.85% |
| Consensus | | N | N | A | A | A | T | N |
| | | (T > V) | | | | | | |

TABLE 10
Protospacer adjacent motif (PAM) preferences for ID9 Clade 1
Displayed as a position frequency matrix (PFM). Numbers in
brackets [x] represent strong PAM preferences, numbers
in slashes /x/ represent weak PAM preferences.

| | | PAM Position | | | | | | |
|---|---|---|---|---|---|---|---|---|
| | | 1 | 2 | 3 | 4 | 5 | 6 | 7 |
| Nucleotide | G | 27.23% | 12.35% | 35.91% | 5.65% | 0% | 29.72% | 31.39% |
| | A | 9.6% | [83.2%] | /48.04%/ | 19.98% | 0% | 21.22% | 9.29% |
| | T | 24.91% | 0.73% | 4.92% | [70.58%] | 0% | 12.79% | 30.15% |
| | C | 38.26% | 3.72% | 11.13% | 3.79% | [100%] | 36.27% | 29.17% |
| Consensus | | N | A | V | T | C | N | N |
| | | | | (A > G > C) | | | | |

TABLE 11
Protospacer adjacent motif (PAM) preferences for ID12 Clade 2
Displayed as a position frequency matrix (PFM). Numbers in
brackets [x] represent strong PAM preferences, numbers
in slashes /x/ represent weak PAM preferences.

| | | PAM Position | | | | | | |
|---|---|---|---|---|---|---|---|---|
| | | 1 | 2 | 3 | 4 | 5 | 6 | 7 |
| Nucleotide | G | 21.92% | 20.6% | 14.54% | 21.79% | 0% | 0% | 6.48% |
| | A | 21.26% | /46.96%/ | 26.87% | 38.08% | 0% | 0% | 8.92% |
| | T | 23.77% | 8.06% | 27.05% | 34.31% | 0% | 0% | /44.69%/ |
| | C | 33.04% | 24.38% | 31.54% | 5.82% | [100%] | [100%] | 39.92% |
| Consensus | | N | N | N | N | C | C | N |
| | | | (A > S > T) | | (W > G > C) | | | (Y > R) |

TABLE 12
Protospacer adjacent motif (PAM) preferences for ID13 Clade 2

| | | PAM Position | | | | | | |
|---|---|---|---|---|---|---|---|---|
| | | 1 | 2 | 3 | 4 | 5 | 6 | 7 |
| Nucleotide | G | 25.31% | 23.72% | 2.93% | 3.87% | 0% | 0% | 25.89% |
| | A | 15.05% | 37.23% | [97.02%] | 24.57% | [93.86%] | 0% | 28.74% |
| | T | 30.05% | 12.64% | 0% | /45.21%/ | 3.67% | 12.01% | 23.85% |
| | C | 29.59% | 26.41% | 0.05% | 26.35% | 2.48% | [87.99%] | 21.52% |
| Consensus | | N | N | A | H (T > M) | A | C | N |

Displayed as a position frequency matrix (PFM). Numbers in brackets [x] represent strong PAM preferences, numbers in slashes /x/ represent weak PAM preferences.

TABLE 13
Protospacer adjacent motif (PAM) preferences for ID16 Clade 3

| | | PAM Position | | | | | | |
|---|---|---|---|---|---|---|---|---|
| | | 1 | 2 | 3 | 4 | 5 | 6 | 7 |
| Nucleotide | G | 14.16% | [93.5%] | 1.83% | [85.98%] | 0.16% | 33.41% | 26.87% |
| | A | 26.12% | 3.56% | 13.32% | 11.24% | [86.61%] | 11.29% | 23.92% |
| | T | 24.65% | 0.3% | [64.11%] | 2.68% | 2.69% | 33.07% | 30.21% |
| | C | 35.07% | 2.65% | 20.73% | 0.1% | 10.54% | 22.23% | 19.01% |
| Consensus | | N | G | T | G | A | N | N |

Displayed as a position frequency matrix (PFM). Numbers in brackets [x] represent strong PAM preferences, numbers in slashes /x/ represent weak PAM preferences.

TABLE 14
Protospacer adjacent motif (PAM) preferences for ID17 Clade 3

| | | PAM Position | | | | | | |
|---|---|---|---|---|---|---|---|---|
| | | 1 | 2 | 3 | 4 | 5 | 6 | 7 |
| Nucleotide | G | 31.01% | 1.81% | [48.09%] | 20.51% | 0.22% | 1.27% | 24.04% |
| | A | 10.3% | [97.24%] | [51.62%] | /41.94%/ | [96.02%] | 1.54% | 35.49% |
| | T | 37.06% | 0.42% | 0% | 29.98% | 0.04% | [92.67%] | 16.87% |
| | C | 21.62% | 0.54% | 0.29% | 7.58% | 3.73% | 4.52% | 23.59% |
| Consensus | | N | A | R | N (A > K > C) | A | T | N |

Displayed as a position frequency matrix (PFM). Numbers in brackets [x] represent strong PAM preferences, numbers in slashes /x/ represent weak PAM preferences.

TABLE 15
Protospacer adjacent motif (PAM) preferences for ID18 Clade 3

| | | PAM Position | | | | | | |
|---|---|---|---|---|---|---|---|---|
| | | 1 | 2 | 3 | 4 | 5 | 6 | 7 |
| Nucleotide | G | 22.25% | /53.26%/ | [53.02%] | 22.86% | 0% | 7.32% | 23% |
| | A | 18.57% | 35.41% | [46.92%] | 28.78% | 0.45% | 0.12% | 34.66% |
| | T | 26.14% | 0% | 0 | 25.08% | [98.68%] | [92.53%] | 27.46% |
| | C | 33.04% | 11.33% | 0.06 | 23.27% | 0.87% | 0.03% | 14.88% |
| Consensus | | N | V (G > A > C) | R | N | T | T | N |

Displayed as a position frequency matrix (PFM). Numbers in brackets [x] represent strong PAM preferences, numbers in slashes /x/ represent weak PAM preferences.

TABLE 16
Protospacer adjacent motif (PAM) preferences for ID19 Clade 3

| | | PAM Position | | | | | | |
|---|---|---|---|---|---|---|---|---|
| | | 1 | 2 | 3 | 4 | 5 | 6 | 7 |
| Nucleotide | G | 24.51% | 6.95% | /42.48%/ | 34.06% | 0% | 0% | 35.8% |
| | A | 14.06% | /50.32%/ | /48.28%/ | /43.01%/ | 6.8% | 0% | 31.95% |
| | T | 29.38% | 17.63% | 1% | 16.44% | 0% | 3.89% | 16.29% |
| | C | 32.06% | 25.1% | 8.24% | 6.5% | [93.2%] | [96.11%] | 15.95% |
| Consensus | | N | N (A > B) | R | N (A > G > | C | C | N |
| | | | | | T > C) | | | |

Displayed as a position frequency matrix (PFM). Numbers in brackets [x] represent strong PAM preferences, numbers in slashes /x/ represent weak PAM preferences.

TABLE 17
Protospacer adjacent motif (PAM) preferences for ID27 Clade 5

| | | PAM Position | | | | | | |
|---|---|---|---|---|---|---|---|---|
| | | 1 | 2 | 3 | 4 | 5 | 6 | 7 |
| Nucleotide | G | 27.54% | 12.25% | 24.63% | 11.40% | 0% | 0% | 3.11% |
| | A | 19.03% | /41.8%/ | 37.36% | 19.92% | 0% | 0% | /55.4%/ |
| | T | 20.49% | 27.98% | 24.88% | /54.55%/ | 0% | 0.30% | 23.50% |
| | C | 32.95% | 17.97% | 13.13% | 14.13% | [100%] | [99.7%] | 18% |
| Consensus | | N | N (A > B) | N | N (T > V) | C | C | H (A > Y) |

Displayed as a position frequency matrix (PFM). Numbers in brackets [x] represent strong PAM preferences, numbers in slashes /x/ represent weak PAM preferences.

TABLE 18
Protospacer adjacent motif (PAM) preferences for ID28 Clade 5

| | | PAM Position | | | | | | | |
|---|---|---|---|---|---|---|---|---|---|
| | | 1 | 2 | 3 | 4 | 5 | 6 | 7 | 8 |
| Nucleotide | G | 20.1% | 13.69% | 8.1% | 10.23% | 0.5% | 27.01% | 0.38% | 0.52% |
| | A | 24.09% | 26.66% | 25.49% | 29.16% | 0.1% | 32.22% | [95.74%] | [99.03%] |
| | T | 24.69% | 26.9% | 32.15% | 26.02% | 0% | 39.55% | 0.44% | 0.39% |
| | C | 31.12% | 32.76% | 34.25% | 34.59% | [99.39%] | 1.22% | 3.44% | 0.07% |
| Consensus | | N | N | N (H > G) | N | C | D | A | A |

Displayed as a position frequency matrix (PFM). Numbers in brackets [x] represent strong PAM preferences, numbers in slashes /x/ represent weak PAM preferences.

TABLE 19
Protospacer adjacent motif (PAM) preferences for ID29 Clade 5

| | | PAM Position | | | | | | |
|---|---|---|---|---|---|---|---|---|
| | | 1 | 2 | 3 | 4 | 5 | 6 | 7 |
| Nucleotide | G | 20.24% | 6.48% | 32.16% | [91.37%] | [93.46%] | 24.58% | 15.75% |
| | A | 16.76% | 26.36% | /40.8%/ | 5.83% | 6.54% | 30.98% | /48.29%/ |
| | T | 24.40% | 31.57% | 25.32% | 2.70% | 0% | 39.92% | 24.16% |
| | C | 38.60% | 35.58% | 1.71% | 0.09% | 0% | 4.52% | 11.80% |
| Consensus | | N | N (H > G) | D (A > K) | G | G | D | N (A > B) |

Displayed as a position frequency matrix (PFM). Numbers in brackets [x] represent strong PAM preferences, numbers in slashes /x/ represent weak PAM preferences.

TABLE 20
Protospacer adjacent motif (PAM) preferences for ID30 Clade 5

| | | PAM Position | | | | | | | |
|---|---|---|---|---|---|---|---|---|---|
| | | 1 | 2 | 3 | 4 | 5 | 6 | 7 | 8 |
| Nucleotide | G | 17.53% | 11.24% | 16.65% | 15.25% | 0.00% | 0.00% | 0.00% | [97.99%] |
| | A | 21.12% | 26.13% | 29.25% | 29.16% | 30.95% | 2.88% | [100.00%] | 0.84% |
| | T | 28.26% | 30.76% | 36.33% | 33.24% | 0.00% | 3.18% | 0.00% | 0.35% |
| | C | 33.09% | 31.88% | 17.77% | 22.36% | [69.05%] | [93.94%] | 0.00% | 0.82% |
| Consensus | | N | N | N | N | C | C | A | G |

Displayed as a position frequency matrix (PFM). Numbers in brackets [x] represent strong PAM preferences, numbers in slashes /x/ represent weak PAM preferences.

TABLE 21
Protospacer adjacent motif (PAM) preferences for ID32 Clade 5

| | | PAM Position | | | | | | | |
|---|---|---|---|---|---|---|---|---|---|
| | | 1 | 2 | 3 | 4 | 5 | 6 | 7 | 8 |
| Nucleotide | G | 21.46% | 5.68% | 11.12% | 13.79% | 0.00% | 0.93% | 1.59% | 5.92% |
| | A | 14.73% | 36.25% | 29.20% | 26.40% | 0.00% | 2.40% | [64.92%] | [80.85%] |
| | T | 25.36% | 27.28% | 34.96% | 28.56% | 0.00% | [60.92%] | 33.49% | 5.07% |
| | C | 38.45% | 30.79% | 24.71% | 31.25% | [100.00%] | 35.76% | 0.00% | 8.16% |
| Consensus | | N | N | N | N | C | T | A | A |

Displayed as a position frequency matrix (PFM). Numbers in brackets [x] represent strong PAM preferences, numbers in slashes /x/ represent weak PAM preferences.

TABLE 22
Protospacer adjacent motif (PAM) preferences for ID33 Clade 5

| | | PAM Position | | | | | | | | | |
|---|---|---|---|---|---|---|---|---|---|---|---|
| | | 1 | 2 | 3 | 4 | 5 | 6 | 7 | 8 | 9 | 10 |
| Nucleotide | G | 22.09% | 7.14% | 14.13% | 11.46% | 0.00% | 29.62% | [98.54%] | 8.83% | 14.01% | 19.37% |
| | A | 5.88% | 31.83% | 30.44% | 34.78% | 0.00% | 39.89% | 1.32% | [72.61%] | /51.42%/ | 31.58% |
| | T | 29.82% | 32.90% | 29.77% | 22.67% | 0.00% | 0.02% | 0.14% | 13.59% | 16.89% | 26.71% |
| | C | /42.21%/ | 28.12% | 25.67% | 31.08% | [100.00%] | 30.47% | 0.00% | 4.96% | 17.68% | 22.34% |
| Consensus | | N | N | N | N | C | V | G | A | N | N |

Displayed as a position frequency matrix (PFM). Numbers in brackets [x] represent strong PAM preferences, numbers in slashes /x/ represent weak PAM preferences.

TABLE 23
Protospacer adjacent motif (PAM) preferences for ID35 Clade 5

| | | PAM Position | | | | | | |
|---|---|---|---|---|---|---|---|---|
| | | 1 | 2 | 3 | 4 | 5 | 6 | 7 |
| Nucleotide | G | 22.03% | 9.34% | 25.15% | 17.12% | 0% | 0% | 22.47% |
| | A | 14.56% | 39.21% | 35.63% | 9.50% | 0% | 0% | 25.37% |
| | T | 22.33% | 24.30% | 21.03% | [71.71%] | 0% | 0% | 36.60% |
| | C | /41.08%/ | 27.15% | 18.19% | 1.66% | [100%] | [100%] | 15.57% |
| Consensus | | N (C > D) | N | N | T | C | C | N |

Displayed as a position frequency matrix (PFM). Numbers in brackets [x] represent strong PAM preferences, numbers in slashes /x/ represent weak PAM preferences.

TABLE 24
Protospacer adjacent motif (PAM) preferences for ID41 Clade 5

| | | PAM Position | | | | | | |
|---|---|---|---|---|---|---|---|---|
| | | 1 | 2 | 3 | 4 | 5 | 6 | 7 |
| Nucleotide | G | 19.6% | 16.88% | 11.98% | 35.91% | 0.2% | 0.23% | 0.8% |
| | A | 26.01% | 25.05% | 30.09% | 23.09% | 1.17% | 0.01% | [97.57%] |
| | T | 25.84% | 26.95% | 35.06% | 9.22% | 0% | [97.83%] | 0.23% |
| | C | 28.54% | 31.12% | 22.86% | 31.78% | [98.63%] | 1.93% | 1.4% |
| Consensus | | N | N | N | N | C | T | A |

Displayed as a position frequency matrix (PFM). Numbers in brackets [x] represent strong PAM preferences, numbers in slashes /x/ represent weak PAM preferences.

TABLE 25
Protospacer adjacent motif (PAM) preferences for ID44 Clade 5

| | | PAM Position | | | | | | | |
|---|---|---|---|---|---|---|---|---|---|
| | | 1 | 2 | 3 | 4 | 5 | 6 | 7 | 8 |
| Nucleotide | G | 19.80% | 7.57% | 11.08% | 15.61% | [98.54%] | 0.00% | 0.00% | 0.16% |
| | A | 17.69% | 38.78% | 29.27% | 22.89% | 1.46% | 0.00% | [93.02%] | [98.91%] |
| | T | 23.27% | 23.76% | 27.37% | 30.29% | 0.00% | [45.31%] | 6.98% | 0.83% |
| | C | 39.24% | 29.90% | 32.27% | 31.22% | 0.00% | [54.69%] | 0.00% | 0.10% |
| Consensus | | N | N | N | N | C | Y | A | A |

Displayed as a position frequency matrix (PFM). Numbers in brackets [x] represent strong PAM preferences, numbers in slashes /x/ represent weak PAM preferences.

TABLE 26
Protospacer adjacent motif (PAM) preferences for ID46 Clade 6

| | | PAM Position | | | | | | |
|---|---|---|---|---|---|---|---|---|
| | | 1 | 2 | 3 | 4 | 5 | 6 | 7 |
| Nucleotide | G | 26.51% | 25.76% | [97.21%] | [37.66%] | [73.44%] | 28.66% | 8.28% |
| | A | 16.02% | [70.60%] | 2.08% | [44.79%] | 16.96% | 24.92% | 2.22% |
| | T | 12.28% | 0.00% | 0.01% | 0.60% | 8.66% | 31.22% | [47.73%] |
| | C | /45.19%/ | 3.64% | 0.70% | 16.96% | 0.94% | 15.20% | [41.77%] |
| Consensus | | N | A | G | R | G | N | Y |

Displayed as a position frequency matrix (PFM). Numbers in brackets [x] represent strong PAM preferences, numbers in slashes /x/ represent weak PAM preferences.

TABLE 27
Protospacer adjacent motif (PAM) preferences for ID47 Clade 7

| | | PAM Position | | | | | | |
|---|---|---|---|---|---|---|---|---|
| | | 1 | 2 | 3 | 4 | 5 | 6 | 7 |
| Nucleotide | G | 21.09% | 14.51% | [96.97%] | 1.68% | 0.47% | 1.22% | 6.41% |
| | A | 21.36% | 31.40% | 2.71% | /46.42%/ | [91.5%] | [98.06%] | [80.67%] |
| | T | 25.16% | 29.52% | 0.13% | /39.18%/ | 0.91% | 0.56% | 7.71% |
| | C | 32.39% | 24.57% | 0.19% | 12.72% | 7.12% | 0.16% | 5.21% |
| Consensus | | N | N | G | H (W > C) | A | A | A |

Displayed as a position frequency matrix (PFM). Numbers in brackets [x] represent strong PAM preferences, numbers in slashes /x/ represent weak PAM preferences.

TABLE 28
Protospacer adjacent motif (PAM) preferences for ID48 Clade 7

| | | PAM Position | | | | | | |
|---|---|---|---|---|---|---|---|---|
| | | 1 | 2 | 3 | 4 | 5 | 6 | 7 |
| Nucleotide | G | 25.12% | 13.23% | [96.52%] | 2.72% | 1.12% | 2.51% | 27.13% |
| | A | 19.76% | 37.09% | 1.57% | [95.9%] | [90.8%] | [95.87%] | 31.21% |
| | T | 27.23% | 32.68% | 1.52% | 0.02% | 0.04% | 0.52% | 22.90% |
| | C | 27.89% | 17% | 0.39% | 1.36% | 8.04% | 1.11% | 18.75% |
| Consensus | | N | N | G | A | A | A | N |

Displayed as a position frequency matrix (PFM). Numbers in brackets [x] represent strong PAM preferences, numbers in slashes /x/ represent weak PAM preferences.

TABLE 29
Protospacer adjacent motif (PAM) preferences for ID50 Clade 7

| | | PAM Position | | | | | | |
|---|---|---|---|---|---|---|---|---|
| | | 1 | 2 | 3 | 4 | 5 | 6 | 7 |
| Nucleotide | G | 18.16% | 9.71% | 2.12% | 1.86% | 0.48% | 0.87% | 19.56% |
| | A | 15.19% | 25.57% | [97.47%] | [97.38%] | [98.98%] | [98.68%] | [61.85%] |
| | T | 36.44% | 35.35% | 0.03% | 0% | 0% | 0.13% | 11.97% |
| | C | 30.21% | 29.37% | 0.38% | 0.76% | 0.54% | 0.32% | 6.62% |
| Consensus | | N | N | A | A | A | A | A |

Displayed as a position frequency matrix (PFM). Numbers in brackets [x] represent strong PAM preferences, numbers in slashes /x/ represent weak PAM preferences.

TABLE 30
Protospacer adjacent motif (PAM) preferences for ID51 Clade 7

| | | PAM Position | | | | | | |
|---|---|---|---|---|---|---|---|---|
| | | 1 | 2 | 3 | 4 | 5 | 6 | 7 |
| Nucleotide | G | 23.52% | 1.72% | [99.37%] | 9.50% | /39.07%/ | 5.89% | 7.91% |
| | A | 21.33% | 6.50% | 0.58% | [89.72%] | [59.06%] | /45.26%/ | 9.79% |
| | T | 25.10% | [65.77%] | 0.01% | 0% | 1.05% | 23.46% | /39.29%/ |
| | C | 30.05% | 26.02% | 0.04% | 0.78% | 0.82% | 25.40% | /43.01%/ |
| Consensus | | N | T | G | A | R (G > A) | N (A > Y > G) | N (Y > R) |

Displayed as a position frequency matrix (PFM). Numbers in brackets [x] represent strong PAM preferences, numbers in slashes /x/ represent weak PAM preferences.

TABLE 31
Protospacer adjacent motif (PAM) preferences for ID52 Clade 7

| | | PAM Position | | | | | | |
|---|---|---|---|---|---|---|---|---|
| | | 1 | 2 | 3 | 4 | 5 | 6 | 7 |
| Nucleotide | G | 18.00% | 4.92% | [87.99%] | 1.61% | 18.62% | 13.60% | 12.07% |
| | A | 20.27% | 34.84% | 11.02% | 6.15% | /53.71%/ | [69.84%] | /52.19%/ |
| | T | 18.20% | 20.00% | 0.00% | /55.44%/ | 13.96% | 12.71% | 21.31% |
| | C | /43.53%/ | /40.24%/ | 0.99% | 36.80% | 13.72% | 3.85% | 14.44% |
| Consensus | | N (C > D) | H (C > W) | G | H (Y > A) | N(A > B) | A | N(A > T > S) |

Displayed as a position frequency matrix (PFM). Numbers in brackets [x] represent strong PAM preferences, numbers in slashes /x/ represent weak PAM preferences.

TABLE 32
Protospacer adjacent motif (PAM) preferences for ID56 Clade 7

| | | PAM Position | | | | | | |
|---|---|---|---|---|---|---|---|---|
| | | 1 | 2 | 3 | 4 | 5 | 6 | 7 |
| Nucleotide | G | 18.78% | 15.33% | 4.88% | 11.14% | 18.77% | 0.21% | 20.14% |
| | A | 23.55% | 25.44% | [91.9%] | [82.72%] | [76.54%] | 8.37% | 33.96% |
| | T | 27.99% | 29.19% | 0.46% | 0.26% | 0% | 2.49% | 24.76% |
| | C | 29.68% | 30.04% | 2.77% | 5.89% | 4.69% | [88.93%] | 21.15% |
| Consensus | | N | N | A | A | A | C | N |

Displayed as a position frequency matrix (PFM). Numbers in brackets [x] represent strong PAM preferences, numbers in slashes /x/ represent weak PAM preferences.

TABLE 33
Protospacer adjacent motif (PAM) preferences for ID60 Clade 7

| | | PAM Position | | | | | | |
|---|---|---|---|---|---|---|---|---|
| | | 1 | 2 | 3 | 4 | 5 | 6 | 7 |
| Nucleotide | G | 24.17% | 15.28% | [97.1%] | 0.41% | 0.09% | 0.18% | 4.03% |
| | A | 29.63% | 27.87% | 2.34% | 7.16% | [96.54%] | [55.4%] | 3.18% |
| | T | 19.14% | 31.83% | 0.31% | [80.64%] | 0.09% | 2.32% | [47.41%] |
| | C | 27.07% | 25.02% | 0.25% | 11.79% | 3.28% | /42.09%/ | [45.38%] |
| Consensus | | N | N | G | T | A | M (A > C) | Y |

Displayed as a position frequency matrix (PFM). Numbers in brackets [x] represent strong PAM preferences, numbers in slashes /x/ represent weak PAM preferences.

TABLE 34
Protospacer adjacent motif (PAM) preferences for ID61 Clade 7

| | | PAM Position | | | | | | |
|---|---|---|---|---|---|---|---|---|
| | | 1 | 2 | 3 | 4 | 5 | 6 | 7 |
| Nucleotide | G | 16.33% | 2.30% | 10.45% | [49.71%] | 10.27% | 5.21% | 15.67% |
| | A | 22.71% | /40.64%/ | [82.63%] | [48.82%] | 31.37% | 24.51% | 24.47% |
| | T | 24.79% | 27.85% | 1.16% | 0.10% | 20.68% | 18.23% | 26.59% |
| | C | 36.17% | 29.22% | 5.76% | 1.37% | 37.68% | /52.04%/ | 33.27% |
| Consensus | | N | H (A > Y) | A | R | N | N (C > W > G) | N |

Displayed as a position frequency matrix (PFM). Numbers in brackets [x] represent strong PAM preferences, numbers in slashes /x/ represent weak PAM preferences.

TABLE 35
Protospacer adjacent motif (PAM) preferences for ID63 Clade 8

| | | PAM Position | | | | | | |
|---|---|---|---|---|---|---|---|---|
| | | 1 | 2 | 3 | 4 | 5 | 6 | 7 |
| Nucleotide | G | 18.02% | [100.00%] | [100.00%] | 5.80% | 13.04% | 11.96% | 23.28% |
| | A | 1.58% | 0.00% | 0.00% | /44.96%/ | 33.20% | 37.33% | 28.59% |
| | T | 16.39% | 0.00% | 0.00% | 26.50% | /42.62%/ | 23.30% | 26.37% |
| | C | [64.01%] | 0.00% | 0.00% | 22.73% | 11.14% | 27.41% | 21.77% |
| Consensus | | B (C > K) | G | G | N(A > Y > G) | N | N | N |

Displayed as a position frequency matrix (PFM). Numbers in brackets [x] represent strong PAM preferences, numbers in slashes /x/ represent weak PAM preferences.

TABLE 36
Protospacer adjacent motif (PAM) preferences for ID64 Clade 9

| | | PAM Position | | | | | | |
|---|---|---|---|---|---|---|---|---|
| | | 1 | 2 | 3 | 4 | 5 | 6 | 7 |
| Nucleotide | G | 12.01% | 0% | [100%] | 0.07% | 19.95% | 26.33% | 24.20% |
| | A | 8.86% | [99.63%] | 0% | [94.81%] | /50.21%/ | 29.24% | 25.36% |
| | T | /48.83%/ | 0.37% | 0% | 3.02% | 24.39% | 34.46% | 24.57% |
| | C | 30.30% | 0% | 0% | 2.11% | 5.45% | 9.97% | 25.87% |
| Consensus | | N (T > C > R) | A | G | A | N (A > K > C) | N | N |

Displayed as a position frequency matrix (PFM). Numbers in brackets [x] represent strong PAM preferences, numbers in slashes /x/ represent weak PAM preferences.

TABLE 37
Protospacer adjacent motif (PAM) preferences for ID65 Clade 9

| | | PAM Position | | | | | | |
|---|---|---|---|---|---|---|---|---|
| | | 1 | 2 | 3 | 4 | 5 | 6 | 7 |
| Nucleotide | G | 29.95% | [98.81%] | [100%] | 20.33% | 11.57% | 20.52% | 21.23% |
| | A | 22.13% | 1.11% | 0% | /40.36%/ | 28.8% | 25.49% | 21.63% |
| | T | 23.24% | 0% | 0% | 32.01% | 39.99% | 27.35% | 28.24% |
| | C | 24.68% | 0.08% | 0% | 7.31% | 19.64% | 26.64% | 28.91% |
| Consensus | | N | G | G | N | N | N | N |
| | | | | | (A > T > G > C) | | | |

Displayed as a position frequency matrix (PFM). Numbers in brackets [x] represent strong PAM preferences, numbers in slashes /x/ represent weak PAM preferences.

TABLE 38
Protospacer adjacent motif (PAM) preferences for ID66 Clade 9

| | | PAM Position | | | | | | |
|---|---|---|---|---|---|---|---|---|
| | | 1 | 2 | 3 | 4 | 5 | 6 | 7 |
| Nucleotide | G | 29.95% | [100.00%] | [100.00%] | 8.51% | 3.40% | 24.99% | 26.27% |
| | A | 9.78% | 0.00% | 0.00% | /50.57%/ | 20.08% | 30.56% | 20.09% |
| | T | /42.89%/ | 0.00% | 0.00% | 38.92% | [62.19%] | 20.92% | 25.07% |
| | C | 17.38% | 0.00% | 0.00% | 2.01% | 14.32% | 23.53% | 28.56% |
| Consensus | | N | G | G | D (A > T > G) | T | N | N |

Displayed as a position frequency matrix (PFM). Numbers in brackets [x] represent strong PAM preferences, numbers in slashes /x/ represent weak PAM preferences.

TABLE 39
Protospacer adjacent motif (PAM) preferences for ID67 Clade 9

| | | PAM Position | | | | | | |
|---|---|---|---|---|---|---|---|---|
| | | 1 | 2 | 3 | 4 | 5 | 6 | 7 |
| Nucleotide | G | /42.62%/ | [100.00%] | [100.00%] | 4.86% | 5.70% | 18.40% | 25.58% |
| | A | 9.95% | 0.00% | 0.00% | [60.99%] | 25.61% | /40.20%/ | 26.75% |
| | T | 30.10% | 0.00% | 0.00% | 30.95% | /54.61%/ | 19.59% | 22.24% |
| | C | 17.33% | 0.00% | 0.00% | 3.20% | 14.08% | 21.81% | 25.42% |
| Consensus | | N | G | G | A | N(T > A > | N | N |
| | | | | | | C > G) | | |

Displayed as a position frequency matrix (PFM). Numbers in brackets [x] represent strong PAM preferences, numbers in slashes /x/ represent weak PAM preferences.

TABLE 40
Protospacer adjacent motif (PAM) preferences for ID68 Clade 9

| | | PAM Position | | | | | | |
|---|---|---|---|---|---|---|---|---|
| | | 1 | 2 | 3 | 4 | 5 | 6 | 7 |
| Nucleotide | G | 14.54% | [100.00%] | [100.00%] | 4.29% | 28.33% | 26.60% | 19.02% |
| | A | [74.70%] | 0.00% | 0.00% | [41.25%] | 22.57% | 18.82% | 23.93% |
| | T | 5.28% | 0.00% | 0.00% | [50.74%] | /42.19%/ | 26.56% | 33.25% |
| | C | 5.47% | 0.00% | 0.00% | 3.72% | 6.91% | 28.02% | 23.80% |
| Consensus | | C | G | G | W | N (T > R > C) | N | N |

Displayed as a position frequency matrix (PFM). Numbers in brackets [x] represent strong PAM preferences, numbers in slashes /x/ represent weak PAM preferences.

TABLE 41
Protospacer adjacent motif (PAM) preferences for ID70 Clade 9

| | | PAM Position | | | | | | |
|---|---|---|---|---|---|---|---|---|
| | | 1 | 2 | 3 | 4 | 5 | 6 | 7 |
| Nucleotide | G | 24.91% | [99.98%] | [100.00%] | 5.34% | [94.33%] | 19.93% | 29.84% |
| | A | 26.13% | 0.02% | 0.00% | [46.68%] | 1.55% | 23.48% | 30.32% |
| | T | 18.33% | 0.00% | 0.00% | [40.21%] | 4.09% | 37.54% | 28.07% |
| | C | 30.63% | 0.00% | 0.00% | 7.78% | 0.04% | 19.05% | 11.76% |
| Consensus | | N | G | G | W | G | N | N |

Displayed as a position frequency matrix (PFM). Numbers in brackets [x] represent strong PAM preferences, numbers in slashes /x/ represent weak PAM preferences.

TABLE 42
Protospacer adjacent motif (PAM) preferences for ID71 Clade 9

| | | PAM Position | | | | | | |
|---|---|---|---|---|---|---|---|---|
| | | 1 | 2 | 3 | 4 | 5 | 6 | 7 |
| Nucleotide | G | 33.94% | [96.51%] | [100%] | 21.22% | 10.39% | 17.04% | 21.07% |
| | A | 8.38% | 3.38% | 0% | 38.2% | 21.19% | 25.41% | 19.39% |
| | T | 24.58% | 0.02% | 0% | 30% | /45.92%/ | 28.63% | 27.51% |
| | C | 33.09% | 0.09% | 0% | 10.57% | 22.5% | 28.92% | 32.03% |
| Consensus | | N (B > A) | G | G | N | N (T > V) | N | N |

Displayed as a position frequency matrix (PFM). Numbers in brackets [x] represent strong PAM preferences, numbers in slashes /x/ represent weak PAM preferences.

TABLE 43
Protospacer adjacent motif (PAM) preferences for ID77 Clade 10

| | | PAM Position | | | | | | |
|---|---|---|---|---|---|---|---|---|
| | | 1 | 2 | 3 | 4 | 5 | 6 | 7 |
| Nucleotide | G | 20.44% | 16.02% | [100%] | 5.88% | 0.49% | 0.4% | 34.54% |
| | A | 22.94% | 33.83% | 0% | /50.41%/ | [97.92%] | 0.01% | 16.29% |
| | T | 17.07% | 16.73% | 0% | /39.08%/ | 1.45% | [58.62%] | 33.89% |
| | C | 39.56% | 33.41% | 0% | 4.63% | 0.14% | /40.98%/ | 15.27% |
| Consensus | | N | N | G | D (A > T > G) | A | Y (T > C) | N |

Displayed as a position frequency matrix (PFM). Numbers in brackets [x] represent strong PAM preferences, numbers in slashes /x/ represent weak PAM preferences.

TABLE 44
Protospacer adjacent motif (PAM) preferences for ID78 Clade 10

| | | PAM Position | | | | | | |
|---|---|---|---|---|---|---|---|---|
| | | 1 | 2 | 3 | 4 | 5 | 6 | 7 |
| Nucleotide | G | 10.68% | 2.39% | 15.41% | 0% | 3.57% | 9.44% | 22.67% |
| | A | 23.8% | 16.85% | [84.22%] | [99.64%] | [93.98%] | [70.52%] | 29.29% |
| | T | /44.87%/ | /51.64%/ | 0.03% | 0% | 0.99% | 14.92% | 29.54% |
| | C | 20.65% | 29.11% | 0.34% | 0.36% | 1.46% | 5.12% | 18.5% |
| Consensus | | N (T > V) | H(T > C > A) | A | A | A | A | N |

Displayed as a position frequency matrix (PFM). Numbers in brackets [x] represent strong PAM preferences, numbers in slashes /x/ represent weak PAM preferences.

TABLE 45
Protospacer adjacent motif (PAM) preferences for ID79 Clade 10

| | | PAM Position | | | | | | |
|---|---|---|---|---|---|---|---|---|
| | | 1 | 2 | 3 | 4 | 5 | 6 | 7 |
| Nucleotide | G | 17.96% | [49.6%] | 0.33% | 0.12% | 23.37% | 14.15% | 25.08% |
| | A | 19.51% | [50.11%] | 0% | [99.66%] | [67.06%] | 30.69% | 24.04% |
| | T | 39.37% | 0.03% | [99.45%] | 0% | 0.49% | 39.64% | 32.45% |
| | C | 23.16% | 0.26% | 0.22% | 0.22% | 9.08% | 15.51% | 18.43% |
| Consensus | | N | R | T | A | A | N | N |

Displayed as a position frequency matrix (PFM). Numbers in brackets [x] represent strong PAM preferences, numbers in slashes /x/ represent weak PAM preferences.

TABLE 46
Protospacer adjacent motif (PAM) preferences for ID80 Clade 10

| | | PAM Position | | | | | | |
|---|---|---|---|---|---|---|---|---|
| | | 1 | 2 | 3 | 4 | 5 | 6 | 7 |
| Nucleotide | G | 8.42% | 0.03% | 0.44% | 0.06% | 4.62% | 15.47% | 29.89% |
| | A | 33.01% | 0.61% | [99.2%] | [98.11%] | 17.78% | 6.43% | 23.57% |
| | T | 30.66% | 8.58% | 0% | 0.26% | 35.06% | 38.25% | 24.99% |
| | C | 27.91% | [90.78%] | 0.35% | 1.57% | /42.53%/ | 39.84% | 21.55% |
| Consensus | | N (H > G) | C | A | A | H (Y > A) | N (Y > R) | N |

Displayed as a position frequency matrix (PFM). Numbers in brackets [x] represent strong PAM preferences, numbers in slashes /x/ represent weak PAM preferences.

TABLE 47
Protospacer adjacent motif (PAM) preferences for ID81 Clade 10

| | | PAM Position | | | | | | |
|---|---|---|---|---|---|---|---|---|
| | | 1 | 2 | 3 | 4 | 5 | 6 | 7 |
| Nucleotide | G | 29.96% | 27.29% | 0.34% | 1.38% | 2.24% | 11.3% | 22.57% |
| | A | 14.59% | [65.08%] | 1.88% | [97.76%] | [67.48%] | /48.92%/ | 35.93% |
| | T | 27.33% | 0% | [88.08%] | 0% | 28.63% | 30.55% | 23.15% |
| | C | 28.12% | 7.63% | 9.7% | 0.86% | 1.66% | 9.23% | 18.35% |
| Consensus | | N | A | T | A | A | N | N |
| | | | | | | | (A > T > S) | |

Displayed as a position frequency matrix (PFM). Numbers in brackets [x] represent strong PAM preferences, numbers in slashes /x/ represent weak PAM preferences.

TABLE 48
Protospacer adjacent motif (PAM) preferences for ID87 Clade 10

| | | PAM Position | | | | | | |
|---|---|---|---|---|---|---|---|---|
| | | 1 | 2 | 3 | 4 | 5 | 6 | 7 |
| Nucleotide | G | 25.83% | 31.80% | 38.79% | 12.23% | 0.08% | 0% | 20.01% |
| | A | 25.90% | /50.88%/ | /55.74%/ | [87.6%] | 2.01% | 3.30% | 30.63% |
| | T | 25.64% | 4.20% | 3.18% | 0% | 6.79% | 25.75% | 26.88% |
| | C | 22.64% | 13.12% | 2.29% | 0.18% | [91.12%] | [70.96%] | 22.49% |
| Consensus | | N | V (A > G > C) | R (A > G) | A | C | C | N |

Displayed as a position frequency matrix (PFM). Numbers in brackets [x] represent strong PAM preferences, numbers in slashes /x/ represent weak PAM preferences.

TABLE 49
Protospacer adjacent motif (PAM) preferences for ID94 Clade 11

| | | PAM Position | | | | | | |
|---|---|---|---|---|---|---|---|---|
| | | 1 | 2 | 3 | 4 | 5 | 6 | 7 |
| Nucleotide | G | 13.46% | 6.70% | 13.39% | 28.71% | [99.1%] | 25.66% | 0% |
| | A | 3.38% | 24.93% | [59.5%] | /48.9%/ | 0.90% | [69.36%] | 0% |
| | T | 22.26% | 25.44% | 16.06% | 4.46% | 0% | 2.51% | 33.08% |
| | C | [60.9%] | /42.94%/ | 11.05% | 17.93% | 0% | 2.46% | [66.92%] |
| Consensus | | C | N | A | V (A > S) | G | A | C |
| | | | (C > W > G) | | | | | |

Displayed as a position frequency matrix (PFM). Numbers in brackets [x] represent strong PAM preferences, numbers in slashes /x/ represent weak PAM preferences.

TABLE 50
Protospacer adjacent motif (PAM) preferences for ID97 Clade 11

| | | PAM Position | | | | | | |
|---|---|---|---|---|---|---|---|---|
| | | 1 | 2 | 3 | 4 | 5 | 6 | 7 |
| Nucleotide | G | 19.77% | 7.13% | /49.18%/ | 19.04% | 0% | 0.55% | 0.51% |
| | A | 15.06% | 31.96% | /50.58%/ | 39.67% | 0.51% | [82.96%] | 0.16% |
| | T | 29.42% | 26.91% | 0.04% | 23.74% | 14.81% | 3.03% | 38.27% |
| | C | 35.75% | 33.99% | 0.20% | 17.55% | [84.68%] | 13.46% | [61.06%] |
| Consensus | | N | N | R | N | C | A | C |

Displayed as a position frequency matrix (PFM). Numbers in brackets [x] represent strong PAM preferences, numbers in slashes /x/ represent weak PAM preferences.

TABLE 51
Protospacer adjacent motif (PAM) preferences for ID102 Clade 12

| | | PAM Position | | | | | | |
|---|---|---|---|---|---|---|---|---|
| | | 1 | 2 | 3 | 4 | 5 | 6 | 7 |
| Nucleotide | G | 16.73% | [99.91%] | [100.00%] | 13.17% | /43.25%/ | 23.63% | 18.92% |
| | A | /55.36%/ | 0.09% | 0.00% | [36.82%] | 23.17% | 28.78% | 33.64% |
| | T | 16.66% | 0.00% | 0.00% | [46.75%] | 29.00% | 23.22% | 29.38% |
| | C | 11.26% | 0.00% | 0.00% | 3.26% | 4.58% | 24.37% | 18.06% |
| Consensus | | N(A > B) | G | G | D (W > G) | D (G > W) | N | N |

Displayed as a position frequency matrix (PFM). Numbers in brackets [x] represent strong PAM preferences, numbers in slashes /x/ represent weak PAM preferences.

TABLE 52
Protospacer adjacent motif (PAM) preferences for ID83 Clade 1

| | | PAM Position | | | | | | |
|---|---|---|---|---|---|---|---|---|
| | | 1 | 2 | 3 | 4 | 5 | 6 | 7 |
| Nucleotide | G | 21.29% | [69.99%] | /55.33%/ | [96.57%] | 3.91% | 0.03% | 27.00% |
| | A | 4.07% | 30.01% | 26.95% | 3.43% | 11.82% | 0.09% | /42.82%/ |
| | T | 36.48% | 0.00% | 16.30% | 0.00% | [78.79%] | 0.36% | 24.52% |
| | C | 38.16% | 0.00% | 1.42% | 0.00% | 5.47% | [99.52%] | 5.66% |
| Consensus | | B | G | D (G > W) | G | T | C | N(A > K > C) |

Displayed as a position frequency matrix (PFM). Numbers in brackets [x] represent strong PAM preferences, numbers in slashes /x/ represent weak PAM preferences.

TABLE 53
Protospacer adjacent motif (PAM) preferences for ID84 Clade 1

| | | PAM Position | | | | | | |
|---|---|---|---|---|---|---|---|---|
| | | 1 | 2 | 3 | 4 | 5 | 6 | 7 |
| Nucleotide | G | 26.80% | 23.57% | 28.47% | 9.76% | 29.69% | 0.00% | 22.61% |
| | A | 17.55% | [68.75%] | [71.16%] | /46.84%/ | [70.25%] | 0.00% | 36.36% |
| | T | 25.16% | 0.05% | 0.00% | 30.92% | 0.00% | 0.00% | 17.25% |
| | C | 30.49% | 7.63% | 0.36% | 12.47% | 0.06% | [100.00%] | 23.78% |
| Consensus | | N | A | A | N | A | C | N |

Displayed as a position frequency matrix (PFM). Numbers in brackets [x] represent strong PAM preferences, numbers in slashes /x/ represent weak PAM preferences.

TABLE 54
Protospacer adjacent motif (PAM) preferences for ID85 Clade 5

| | | PAM Position | | | | | | |
|---|---|---|---|---|---|---|---|---|
| | | 1 | 2 | 3 | 4 | 5 | 6 | 7 |
| Nucleotide | G | 17.42% | [53.62%] | 4.73% | 0.45% | 2.01% | 18.15% | 15.99% |
| | A | 30.45% | [43.97%] | 0.06% | /49.54%/ | [92.82%] | /53.05%/ | 36.07% |
| | T | 30.96% | 1.11% | [92.25%] | 31.86% | 4.44% | 16.94% | 29.85% |
| | C | 21.16% | 1.30% | 2.96% | 18.15% | 0.73% | 11.85% | 18.09% |
| Consensus | | N | R | T | H | A | N(A > B) | N |

Displayed as a position frequency matrix (PFM). Numbers in brackets [x] represent strong PAM preferences, numbers in slashes /x/ represent weak PAM preferences.

TABLE 55
Protospacer adjacent motif (PAM) preferences for ID88 Clade 5

| | | PAM Position | | | | | | |
|---|---|---|---|---|---|---|---|---|
| | | 1 | 2 | 3 | 4 | 5 | 6 | 7 |
| Nucleotide | G | 15.23% | 3.65% | 6.39% | 28.21% | [100.00%] | 10.46% | 3.68% |
| | A | 1.33% | 35.26% | 34.29% | 22.17% | 0.00% | 19.54% | 16.19% |
| | T | 31.94% | 23.85% | 24.91% | 35.52% | 0.00% | /48.96%/ | 37.01% |
| | C | /51.50%/ | 37.23% | 34.40% | 14.10% | 0.00% | 21.04% | /43.11%/ |
| Consensus | | B | H | N (H > G) | N | G | N(T > M) | H(Y > A) |

Displayed as a position frequency matrix (PFM). Numbers in brackets [x] represent strong PAM preferences, numbers in slashes /x/ represent weak PAM preferences.

TABLE 56
Protospacer adjacent motif (PAM) preferences for ID91 Clade 3

| | | PAM Position | | | | | | |
|---|---|---|---|---|---|---|---|---|
| | | 1 | 2 | 3 | 4 | 5 | 6 | 7 |
| Nucleotide | G | 17.45% | 9.96% | [47.08%] | 12.89% | 0.08% | 3.20% | 15.05% |
| | A | 18.82% | [48.84%] | [48.45%] | /42.75%/ | [90.63%] | 10.35% | 28.37% |
| | T | 23.00% | 1.78% | 0.00% | 21.97% | 1.91% | 33.16% | 28.30% |
| | C | /40.72%/ | [39.42%] | 4.47% | 22.39% | 7.38% | /53.30%/ | 28.28% |
| Consensus | | N | M | R | N(A > Y > G) | A | H(C > T > A) | N |

Displayed as a position frequency matrix (PFM). Numbers in brackets [x] represent strong PAM preferences, numbers in slashes /x/ represent weak PAM preferences.

TABLE 57
Protospacer adjacent motif (PAM) preferences for ID93 Clade 3

| | | PAM Position | | | | | | |
|---|---|---|---|---|---|---|---|---|
| | | 1 | 2 | 3 | 4 | 5 | 6 | 7 |
| Nucleotide | G | 25.77% | 12.84% | 17.81% | 0.00% | 0.01% | 0.00% | 32.43% |
| | A | 13.74% | 33.00% | 26.81% | 5.22% | [96.69%] | 0.01% | 28.00% |
| | T | 23.55% | 27.15% | 31.60% | 7.76% | 2.97% | 0.00% | 21.13% |
| | C | 36.95% | 27.01% | 23.78% | [87.03%] | 0.33% | [99.99%] | 18.44% |
| Consensus | | N | N | N | C | A | C | N |

Displayed as a position frequency matrix (PFM). Numbers in brackets [x] represent strong PAM preferences, numbers in slashes /x/ represent weak PAM preferences.

TABLE 58
Protospacer adjacent motif (PAM) preferences for ID94 Clade 3

| | | PAM Position | | | | | | |
|---|---|---|---|---|---|---|---|---|
| | | 1 | 2 | 3 | 4 | 5 | 6 | 7 |
| Nucleotide | G | 33.90% | 3.24% | [40.55%] | 10.77% | 0.40% | 0.01% | 35.20% |
| | A | 24.40% | [96.24%] | [56.77%] | 32.74% | [92.08%] | 1.03% | 24.78% |
| | T | 19.50% | 0.30% | 0.10% | /47.78%/ | 0.33% | 0.13% | 17.92% |
| | C | 22.20% | 0.22% | 2.59% | 8.71% | 7.19% | [98.83%] | 22.10% |
| Consensus | | N | A | R | N(T > A > S) | A | C | N |

Displayed as a position frequency matrix (PFM). Numbers in brackets [x] represent strong PAM preferences, numbers in slashes /x/ represent weak PAM preferences.

TABLE 59
Protospacer adjacent motif (PAM) preferences for ID96 Clade 5

| | | PAM Position | | | | | | |
|---|---|---|---|---|---|---|---|---|
| | | 1 | 2 | 3 | 4 | 5 | 6 | 7 |
| Nucleotide | G | 24.38% | 17.48% | 26.35% | 30.52% | 0.04% | 0.00% | 0.29% |
| | A | 22.39% | 27.59% | 34.39% | 23.04% | [99.96%] | 0.00% | [55.85%] |
| | T | 30.35% | 32.34% | 21.12% | 32.84% | 0.00% | [89.28%] | [43.70%] |
| | C | 22.89% | 22.59% | 18.14% | 13.60% | 0.00% | 10.72% | 0.17% |
| Consensus | | N | N | N | N | A | T | W |

Displayed as a position frequency matrix (PFM). Numbers in brackets [x] represent strong PAM preferences, numbers in slashes /x/ represent weak PAM preferences.

TABLE 60
Protospacer adjacent motif (PAM) preferences for ID98 Clade 3

| | | PAM Position | | | | | | |
|---|---|---|---|---|---|---|---|---|
| | | 1 | 2 | 3 | 4 | 5 | 6 | 7 |
| Nucleotide | G | 8.87% | [89.17%] | 1.36% | 21.49% | [84.56%] | 0.17% | 32.45% |
| | A | 21.23% | 7.29% | 1.95% | 24.66% | 3.76% | 3.87% | /40.20%/ |
| | T | 28.78% | 0.01% | 9.16% | 15.83% | 9.76% | 7.63% | 12.82% |
| | C | 41.12% | 3.53% | [87.53%] | 38.01% | 1.92% | [88.33%] | 14.54% |
| Consensus | | N | G | C | N | G | C | N |

Displayed as a position frequency matrix (PFM). Numbers in brackets [x] represent strong PAM preferences, numbers in slashes /x/ represent weak PAM preferences.

TABLE 61
Protospacer adjacent motif (PAM) preferences for ID101 Clade 3

| | | PAM Position | | | | | | |
|---|---|---|---|---|---|---|---|---|
| | | 1 | 2 | 3 | 4 | 5 | 6 | 7 |
| Nucleotide | G | 20.01% | 11.34% | 23.82% | 0.00% | 0.00% | 0.00% | 20.18% |
| | A | 20.55% | 26.03% | 24.66% | 12.82% | [98.81%] | 8.54% | 35.07% |
| | T | 19.48% | 23.24% | 32.59% | 0.45% | 1.00% | [91.33%] | 26.49% |
| | C | 39.96% | 39.39% | 18.94% | [86.73%] | 0.19% | 0.13% | 18.26% |
| Consensus | | N | N | N | C | A | T | N |

Displayed as a position frequency matrix (PFM). Numbers in brackets [x] represent strong PAM preferences, numbers in slashes /x/ represent weak PAM preferences.

TABLE 62
Protospacer adjacent motif (PAM) preferences for ID103 Clade 2

| | | PAM Position | | | | | | |
|---|---|---|---|---|---|---|---|---|
| | | 1 | 2 | 3 | 4 | 5 | 6 | 7 |
| Nucleotide | G | 16.15% | 18.90% | [65.15%] | 31.12% | [75.29%] | 0.00% | 14.10% |
| | A | 32.93% | [74.24%] | 34.60% | 35.43% | 24.71% | 2.54% | 26.89% |
| | T | 22.28% | 0.00% | 0.00% | 17.78% | 0.00% | 0.00% | 32.85% |
| | C | 28.64% | 6.86% | 0.25% | 15.67% | 0.00% | [97.46%] | 26.16% |
| Consensus | | N | A | G | N | G | C | N |

Displayed as a position frequency matrix (PFM). Numbers in brackets [x] represent strong PAM preferences, numbers in slashes /x/ represent weak PAM preferences.

TABLE 63
Protospacer adjacent motif (PAM) preferences for ID104 Clade 1

| | | PAM Position | | | | | | |
|---|---|---|---|---|---|---|---|---|
| | | 1 | 2 | 3 | 4 | 5 | 6 | 7 |
| Nucleotide | G | 26.47% | 23.57% | [49.94%] | 5.78% | 0.00% | 0.00% | 32.11% |
| | A | 21.51% | [64.48%] | [47.51%] | 19.40% | 1.31% | 1.41% | 28.90% |
| | T | 20.60% | 0.07% | 1.15% | /43.06%/ | 0.00% | 1.64% | 20.22% |
| | C | 31.41% | 11.88% | 1.39% | 31.76% | [98.69%] | [96.95%] | 18.77% |
| Consensus | | N | A | R | N(T > M > G) | C | C | N |

Displayed as a position frequency matrix (PFM). Numbers in brackets [x] represent strong PAM preferences, numbers in slashes /x/ represent weak PAM preferences.

TABLE 64
Protospacer adjacent motif (PAM) preferences for ID105 Clade 2

| | | PAM Position | | | | | | |
|---|---|---|---|---|---|---|---|---|
| | | 1 | 2 | 3 | 4 | 5 | 6 | 7 |
| Nucleotide | G | 26.70% | 11.24% | 3.62% | 0.48% | 0.00% | 5.98% | 25.19% |
| | A | 25.30% | [60.72%] | 14.33% | 10.21% | 2.18% | 0.15% | 22.86% |
| | T | 23.50% | 22.59% | [64.96%] | 8.66% | 0.00% | [81.78%] | 16.31% |
| | C | 24.51% | 5.45% | 17.09% | [80.65%] | [97.82%] | 12.09% | 35.64% |
| Consensus | | N | A | T | C | C | T | N |

Displayed as a position frequency matrix (PFM). Numbers in brackets [x] represent strong PAM preferences, numbers in slashes /x/ represent weak PAM preferences.

TABLE 65
Protospacer adjacent motif (PAM) preferences for ID106 Clade 6

| | | PAM Position | | | | | | |
|---|---|---|---|---|---|---|---|---|
| | | 1 | 2 | 3 | 4 | 5 | 6 | 7 |
| Nucleotide | G | 19.69% | [46.70%] | 0.00% | 0.00% | 24.29% | 11.63% | 24.06% |
| | A | 16.38% | [53.30%] | 0.00% | [100.00%] | [71.30%] | 29.64% | 23.15% |
| | T | 38.91% | 0.00% | [100.00%] | 0.00% | 0.00% | /46.72%/ | 33.44% |
| | C | 25.02% | 0.00% | 0.00% | 0.00% | 4.41% | 12.01% | 19.35% |
| Consensus | | N | R | T | A | A | N(T > A > S) | N |

Displayed as a position frequency matrix (PFM). Numbers in brackets [x] represent strong PAM preferences, numbers in slashes /x/ represent weak PAM preferences.

TABLE 66
Protospacer adjacent motif (PAM) preferences for ID107 Clade 8

| | | PAM Position | | | | | | |
|---|---|---|---|---|---|---|---|---|
| | | 1 | 2 | 3 | 4 | 5 | 6 | 7 |
| Nucleotide | G | 19.44% | 0.54% | 1.45% | 32.87% | 0.50% | 13.62% | 20.21% |
| | A | 7.49% | [98.74%] | [98.05%] | /58.52%/ | 14.45% | 33.94% | 20.81% |
| | T | 32.50% | 0.18% | 0.00% | 8.48% | 3.05% | 31.30% | 34.38% |
| | C | /40.56%/ | 0.54% | 0.50% | 0.13% | [81.99%] | 21.14% | 24.59% |
| Consensus | | N(C > T > G > A) | A | A | D (A > G > T) | C | N | N |

Displayed as a position frequency matrix (PFM). Numbers in brackets [x] represent strong PAM preferences, numbers in slashes /x/ represent weak PAM preferences.

TABLE 67
Protospacer adjacent motif (PAM) preferences for ID108 Clade 8

| | | PAM Position | | | | | | |
|---|---|---|---|---|---|---|---|---|
| | | 1 | 2 | 3 | 4 | 5 | 6 | 7 |
| Nucleotide | G | 12.41% | 5.35% | 0.46% | 21.00% | [75.85%] | 28.22% | 19.32% |
| | A | 13.28% | [87.06%] | [99.54%] | [79.00%] | 20.68% | 29.04% | 30.07% |
| | T | 37.38% | 1.04% | 0.00% | 0.00% | 2.60% | 29.23% | 33.21% |
| | C | 36.93% | 6.54% | 0.00% | 0.00% | 0.87% | 13.51% | 17.40% |
| Consensus | | N | A | A | A | G | N | N |

Displayed as a position frequency matrix (PFM). Numbers in brackets [x] represent strong PAM preferences, numbers in slashes /x/ represent weak PAM preferences.

TABLE 68
Protospacer adjacent motif (PAM) preferences for ID109 Clade 10

| | | PAM Position | | | | | | |
|---|---|---|---|---|---|---|---|---|
| | | 1 | 2 | 3 | 4 | 5 | 6 | 7 |
| Nucleotide | G | 19.23% | 24.61% | [99.54%] | 0.00% | 0.00% | 16.90% | 32.02% |
| | A | 24.52% | 38.19% | 0.46% | [91.30%] | 2.36% | 28.36% | 27.48% |
| | T | 25.09% | 23.78% | 0.00% | 0.00% | 6.53% | 35.06% | 24.12% |
| | C | 31.16% | 13.42% | 0.00% | 8.70% | [91.11%] | 19.68% | 16.37% |
| Consensus | | N | N | G | A | C | N | N |

Displayed as a position frequency matrix (PFM). Numbers in brackets [x] represent strong PAM preferences, numbers in slashes /x/ represent weak PAM preferences.

TABLE 69
Protospacer adjacent motif (PAM) preferences for ID112 Clade 10

| | | PAM Position | | | | | | |
|---|---|---|---|---|---|---|---|---|
| | | 1 | 2 | 3 | 4 | 5 | 6 | 7 |
| Nucleotide | G | 16.33% | 14.11% | 0.00% | 0.00% | 2.17% | 8.84% | 25.79% |
| | A | 19.13% | 25.38% | 6.25% | [100.00%] | [97.22%] | /54.51%/ | 23.51% |
| | T | /42.09%/ | 38.68% | [93.65%] | 0.00% | 0.61% | 34.03% | 34.56% |
| | C | 22.44% | 21.83% | 0.09% | 0.00% | 0.00% | 2.61% | 16.13% |
| Consensus | | N(T > V) | N | T | A | A | D (A > T > G) | N |

Displayed as a position frequency matrix (PFM). Numbers in brackets [x] represent strong PAM preferences, numbers in slashes /x/ represent weak PAM preferences.

TABLE 70
Protospacer adjacent motif (PAM) preferences for ID116 Clade 7

| | | PAM Position | | | | | | |
|---|---|---|---|---|---|---|---|---|
| | | 1 | 2 | 3 | 4 | 5 | 6 | 7 |
| Nucleotide | G | 28.10% | 11.55% | [100.00%] | 16.07% | /41.26%/ | 28.27% | 25.86% |
| | A | 21.76% | 32.90% | 0.00% | [83.93%] | 29.91% | 23.75% | 24.55% |
| | T | 12.65% | 37.58% | 0.00% | 0.00% | 27.98% | 29.78% | 28.58% |
| | C | 37.49% | 17.98% | 0.00% | 0.00% | 0.85% | 18.21% | 21.01% |
| Consensus | | N | N | G | A | D (G > W) | N | N |

Displayed as a position frequency matrix (PFM). Numbers in brackets [x] represent strong PAM preferences, numbers in slashes /x/ represent weak PAM preferences.

TABLE 71
Protospacer adjacent motif (PAM) preferences for ID119 Clade 9

| | | PAM Position | | | | | | |
|---|---|---|---|---|---|---|---|---|
| | | 1 | 2 | 3 | 4 | 5 | 6 | 7 |
| Nucleotide | G | 28.50% | [99.98%] | [99.96%] | 8.85% | 15.49% | 22.77% | 23.35% |
| | A | 32.03% | 0.01% | 0.02% | 34.59% | 30.04% | 26.82% | 22.36% |
| | T | 17.95% | 0.02% | 0.00% | /42.56%/ | 33.76% | 25.64% | 27.82% |
| | C | 21.52% | 0.00% | 0.02% | 14.00% | 20.72% | 24.77% | 26.48% |
| Consensus | | N | G | G | N(W > S) | N | N | N |

Displayed as a position frequency matrix (PFM). Numbers in brackets [x] represent strong PAM preferences, numbers in slashes /x/ represent weak PAM preferences.

TABLE 72
Protospacer adjacent motif (PAM) preferences for ID120 Clade 9

| | | PAM Position | | | | | | |
|---|---|---|---|---|---|---|---|---|
| | | 1 | 2 | 3 | 4 | 5 | 6 | 7 |
| Nucleotide | G | 24.68% | [97.47%] | [100.00%] | 15.48% | [80.56%] | 34.49% | 27.40% |
| | A | 20.40% | 1.49% | 0.00% | /46.59%/ | 2.72% | 19.17% | 33.53% |
| | T | /40.19%/ | 0.40% | 0.00% | 36.15% | 16.69% | 36.64% | 29.09% |
| | C | 14.72% | 0.65% | 0.00% | 1.79% | 0.03% | 9.70% | 9.98% |
| Consensus | | N(T > V) | G | G | D(W > G) | G | N | N |

Displayed as a position frequency matrix (PFM). Numbers in brackets [x] represent strong PAM preferences, numbers in slashes /x/ represent weak PAM preferences.

TABLE 73
Protospacer adjacent motif (PAM) preferences for ID121 Clade 9

| | | PAM Position | | | | | | |
|---|---|---|---|---|---|---|---|---|
| | | 1 | 2 | 3 | 4 | 5 | 6 | 7 |
| Nucleotide | G | 21.64% | [99.88%] | [100.00%] | 18.79% | 8.85% | 18.07% | 23.75% |
| | A | 23.84% | 0.12% | 0.00% | /46.56%/ | 23.04% | 25.24% | 18.83% |
| | T | 29.96% | 0.00% | 0.00% | 30.30% | /50.13%/ | 30.47% | 30.07% |
| | C | 24.56% | 0.00% | 0.00% | 4.35% | 17.98% | 26.23% | 27.36% |
| Consensus | | N | G | G | D(A > T > G) | N(T > M > G) | N | N |

Displayed as a position frequency matrix (PFM). Numbers in brackets [x] represent strong PAM preferences, numbers in slashes /x/ represent weak PAM preferences.

TABLE 74
Protospacer adjacent motif (PAM) preferences for ID122 Clade 7

| | | PAM Position | | | | | | |
|---|---|---|---|---|---|---|---|---|
| | | 1 | 2 | 3 | 4 | 5 | 6 | 7 |
| Nucleotide | G | 24.43% | 19.65% | 0.02% | 1.20% | 5.14% | [98.14%] | 29.37% |
| | A | 20.98% | 28.14% | [99.98%] | [98.35%] | [94.63%] | 1.63% | 25.64% |
| | T | 35.18% | 31.89% | 0.00% | 0.00% | 0.00% | 0.23% | 24.28% |
| | C | 19.40% | 20.32% | 0.00% | 0.44% | 0.23% | 0.00% | 20.70% |
| Consensus | | N | N | A | A | A | G | N |

Displayed as a position frequency matrix (PFM). Numbers in brackets [x] represent strong PAM preferences, numbers in slashes /x/ represent weak PAM preferences.

TABLE 75
Protospacer adjacent motif (PAM) preferences for ID123 Clade 9

| | | PAM Position | | | | | | |
|---|---|---|---|---|---|---|---|---|
| | | 1 | 2 | 3 | 4 | 5 | 6 | 7 |
| Nucleotide | G | 39.61% | [99.95%] | [100.00%] | 17.78% | 6.15% | 16.45% | 24.04% |
| | A | 19.53% | 0.05% | 0.00% | /41.69%/ | 20.33% | 29.55% | 23.86% |
| | T | 23.46% | 0.00% | 0.00% | 36.41% | /56.54%/ | 26.96% | 28.20% |
| | C | 17.40% | 0.00% | 0.00% | 4.12% | 16.99% | 27.04% | 23.91% |
| Consensus | | N(G > H) | G | G | D | N(T > M > G) | N | N |

Displayed as a position frequency matrix (PFM). Numbers in brackets [x] represent strong PAM preferences, numbers in slashes /x/ represent weak PAM preferences.

TABLE 76
Protospacer adjacent motif (PAM) preferences for ID124 Clade 7

| | | PAM Position | | | | | | |
|---|---|---|---|---|---|---|---|---|
| | | 1 | 2 | 3 | 4 | 5 | 6 | 7 |
| Nucleotide | G | 16.86% | 16.49% | 20.40% | [88.50%] | 2.70% | 1.11% | 13.86% |
| | A | 32.84% | 30.59% | [78.18%] | 2.07% | [94.36%] | [95.77%] | [67.88%] |
| | T | 22.62% | 26.74% | 0.08% | 8.07% | 0.54% | 2.89% | 10.86% |
| | C | 27.68% | 26.18% | 1.34% | 1.36% | 2.40% | 0.23% | 7.40% |
| Consensus | | N | N | A | G | A | A | A |

Displayed as a position frequency matrix (PFM). Numbers in brackets [x] represent strong PAM preferences, numbers in slashes /x/ represent weak PAM preferences.

TABLE 77
Protospacer adjacent motif (PAM) preferences for ID125 Clade 7

| | | PAM Position | | | | | | |
|---|---|---|---|---|---|---|---|---|
| | | 1 | 2 | 3 | 4 | 5 | 6 | 7 |
| Nucleotide | G | 16.14% | 6.88% | 0.92% | 0.35% | 0.31% | 0.81% | 21.38% |
| | A | 23.49% | 21.94% | [98.19%] | [99.39%] | [99.27%] | [97.69%] | [64.31%] |
| | T | 32.76% | /43.27%/ | 0.17% | 0.09% | 0.09% | 0.89% | 9.87% |
| | C | 27.61% | 27.90% | 0.72% | 0.17% | 0.33% | 0.61% | 4.43% |
| Consensus | | N | N(T > M > G) | A | A | A | A | A |

Displayed as a position frequency matrix (PFM). Numbers in brackets [x] represent strong PAM preferences, numbers in slashes /x/ represent weak PAM preferences.

TABLE 78
Protospacer adjacent motif (PAM) preferences for ID126 Clade 7

| | | PAM Position | | | | | | |
|---|---|---|---|---|---|---|---|---|
| | | 1 | 2 | 3 | 4 | 5 | 6 | 7 |
| Nucleotide | G | 19.49% | 7.57% | [95.84%] | 2.21% | 27.10% | 8.72% | 10.45% |
| | A | 20.71% | 23.44% | 4.12% | 8.27% | /56.45%/ | [83.93%] | [68.27%] |
| | T | 16.90% | 25.97% | 0.00% | [57.84%] | 12.18% | 6.62% | 14.06% |
| | C | /42.90%/ | /43.02%/ | 0.04% | 31.68% | 4.27% | 0.73% | 7.22% |
| Consensus | | N(C > D) | N(C > W > G) | G | W(T > C) | D(A > G > T) | A | A |

Displayed as a position frequency matrix (PFM). Numbers in brackets [x] represent strong PAM preferences, numbers in slashes /x/ represent weak PAM preferences.

TABLE 79
Protospacer adjacent motif (PAM) preferences for ID127 Clade 10

| | | PAM Position | | | | | | |
|---|---|---|---|---|---|---|---|---|
| | | 1 | 2 | 3 | 4 | 5 | 6 | 7 |
| Nucleotide | G | 25.25% | 26.55% | 8.71% | 3.98% | 1.52% | 1.10% | 22.96% |
| | A | 12.91% | [69.11%] | [82.08%] | [95.92%] | [77.80%] | 0.09% | 27.92% |
| | T | 34.16% | 0.04% | 2.68% | 0.00% | 1.28% | [50.31%] | 24.96% |
| | C | 27.68% | 4.30% | 6.54% | 0.10% | 19.39% | [48.50%] | 24.16% |
| Consensus | | N | A | A | A | A | Y | N |

Displayed as a position frequency matrix (PFM). Numbers in brackets [x] represent strong PAM preferences, numbers in slashes /x/ represent weak PAM preferences.

TABLE 80
Protospacer adjacent motif (PAM) preferences for ID131 Clade 9

| | | PAM Position | | | | | | |
|---|---|---|---|---|---|---|---|---|
| | | 1 | 2 | 3 | 4 | 5 | 6 | 7 |
| Nucleotide | G | 32.38% | [45.99%] | [94.38%] | 10.89% | 11.50% | 22.57% | 17.71% |
| | A | 28.22% | [52.41%] | 4.24% | 33.95% | 26.70% | 26.58% | 27.18% |
| | T | 11.53% | 0.96% | 0.52% | 34.44% | /45.50%/ | 24.63% | 26.27% |
| | C | 27.87% | 0.64% | 0.86% | 20.73% | 16.30% | 26.22% | 28.85% |
| Consensus | | N | R | G | N | N | N | N |

Displayed as a position frequency matrix (PFM). Numbers in brackets [x] represent strong PAM preferences, numbers in slashes /x/ represent weak PAM preferences.

TABLE 81
Protospacer adjacent motif (PAM) preferences for ID132 Clade 10

| | | PAM Position | | | | | | |
|---|---|---|---|---|---|---|---|---|
| | | 1 | 2 | 3 | 4 | 5 | 6 | 7 |
| Nucleotide | G | 17.77% | 6.33% | 0.80% | [65.36%] | 5.70% | 11.21% | 14.11% |
| | A | 14.33% | [71.50%] | 6.90% | 26.81% | 33.68% | 4.99% | 37.97% |
| | T | 32.59% | 3.73% | [63.88%] | 0.00% | 34.29% | [68.57%] | 29.70% |
| | C | 35.31% | 18.44% | 28.42% | 7.83% | 26.34% | 15.22% | 18.21% |
| Consensus | | N | A | T | G | N (H > G) | T | N |

Displayed as a position frequency matrix (PFM). Numbers in brackets [x] represent strong PAM preferences, numbers in slashes /x/ represent weak PAM preferences.

TABLE 82
Protospacer adjacent motif (PAM) preferences for ID136 Clade 9

| | | PAM Position | | | | | | |
|---|---|---|---|---|---|---|---|---|
| | | 1 | 2 | 3 | 4 | 5 | 6 | 7 |
| Nucleotide | G | 17.84% | 25.26% | 38.64% | 3.86% | 0.06% | 0.44% | 15.50% |
| | A | 31.37% | 37.18% | 39.78% | [95.11%] | 0.49% | 0.16% | 12.36% |
| | T | 34.07% | 28.69% | 19.79% | 0.00% | [98.97%] | [98.40%] | [65.48%] |
| | C | 16.73% | 8.86% | 1.79% | 1.02% | 0.48% | 1.01% | 6.66% |
| Consensus | | N | N | D | A | T | T | T |

Displayed as a position frequency matrix (PFM). Numbers in brackets [x] represent strong PAM preferences, numbers in slashes /x/ represent weak PAM preferences.

TABLE 83
Protospacer adjacent motif (PAM) preferences for ID138 Clade 10

| | | PAM Position | | | | | | |
|---|---|---|---|---|---|---|---|---|
| | | 1 | 2 | 3 | 4 | 5 | 6 | 7 |
| Nucleotide | G | 22.46% | 20.19% | 0.68% | 8.49% | [43.74%] | 0.00% | 9.78% |
| | A | 18.76% | [78.12%] | 10.48% | [91.44%] | [53.85%] | 18.32% | 19.57% |
| | T | 34.94% | 0.00% | [83.47%] | 0.00% | 1.09% | 11.13% | 30.01% |
| | C | 23.84% | 1.69% | 5.38% | 0.07% | 1.31% | [70.54%] | /40.64%/ |
| Consensus | | N | A | T | A | R | C | N(C > T > |
| | | | | | | | | A > G) |

Displayed as a position frequency matrix (PFM). Numbers in brackets [x] represent strong PAM preferences, numbers in slashes /x/ represent weak PAM preferences.

TABLE 84
Summary of cutting data for some of the Cas9 orthologs

| Cas9 | | PRT | | | | | |
|---|---|---|---|---|---|---|---|
| Ortholog | NT | SEQ | blunt | sticky | in | plant | HEK |
| ID# | SEQID | ID | end cut | end cut | vitro | cell | cell |
| 2 | 1 | 86 | X | | X | | |
| 3 | 2 | 87 | X | | X | | |
| 4 | 3 | 88 | X | | X | | |
| 5 | 4 | 89 | X | | X | | |
| 6 | 5 | 90 | X | | X | | X |
| 8 | 6 | 91 | X | | X | | X |
| 9 | 7 | 92 | X | | X | | |
| 12 | 8 | 93 | X | | X | | |
| 13 | 9 | 94 | X | | X | | |
| 16 | 10 | 95 | X | | X | | |
| 17 | 11 | 96 | X | | X | | X |
| 18 | 12 | 97 | X | | X | | |
| 19 | 13 | 98 | X | | X | | |
| 21 | 14 | 99 | | | | | |
| 27 | 15 | 100 | X | | X | | X |
| 28 | 16 | 101 | X | | X | | |
| 29 | 17 | 102 | X | | X | | |
| 30 | 18 | 103 | X | | X | | |
| 32 | 19 | 104 | X | | X | | |
| 33 | 20 | 105 | X | | X | X | X |
| 35 | 21 | 106 | X | | X | | |
| 41 | 22 | 107 | X | | X | | |
| 43 | 23 | 108 | | | | | |
| 44 | 24 | 109 | X | | X | | |
| 46 | 25 | 110 | | X | X | | X |
| 47 | 26 | 111 | X | | X | | |
| 48 | 27 | 112 | X | | X | X | X |
| 50 | 28 | 113 | X | | X | X | |
| 51 | 29 | 114 | X | | X | | |
| 52 | 30 | 115 | X | | X | | |
| 56 | 31 | 116 | X | | X | | X |
| 60 | 32 | 117 | X | | X | | |
| 61 | 33 | 118 | X | | X | X | |
| 63 | 34 | 119 | | X | X | X | |
| 64 | 35 | 120 | X | | X | X | X |
| 65 | 36 | 121 | X | | X | | |
| 66 | 37 | 122 | X | | X | | |
| 67 | 38 | 123 | X | | X | | |
| 68 | 39 | 124 | | X | X | | X |
| 70 | 40 | 125 | | X | X | X | |
| 71 | 41 | 126 | X | | X | | |
| 77 | 42 | 127 | X | | X | | |
| 78 | 43 | 128 | X | | X | | X |
| 79 | 44 | 129 | X | | X | | X |
| 80 | 45 | 130 | X | | X | X | |
| 81 | 46 | 131 | X | | X | | |
| 83 | 51 | 136 | X | | X | | |
| 84 | 52 | 137 | X | | X | | |
| 85 | 53 | 138 | X | | X | | |
| 87 | 47 | 132 | X | | X | | |
| 88 | 54 | 139 | X | | X | | |
| 91 | 55 | 140 | X | | X | | |
| 93 | 56 | 141 | X | | X | | |
| 94 | 48 | 133 | X | | X | | |
| 96 | 58 | 143 | X | | X | | |
| 97 | 49 | 134 | X | | X | | |
| 98 | 59 | 144 | X | | X | | |
| 101 | 60 | 145 | X | | X | | |
| 102 | 50 | 135 | | X | X | | |
| 103 | 61 | 146 | X | | X | | |
| 104 | 62 | 147 | X | | X | | |
| 105 | 63 | 148 | X | | X | | |
| 106 | 64 | 149 | X | | X | | |
| 107 | 65 | 150 | X | | X | | |
| 108 | 66 | 151 | | X | X | | |
| 109 | 67 | 152 | X | | X | | |
| 112 | 68 | 153 | X | | X | | |
| 116 | 69 | 154 | X | | X | | |
| 119 | 70 | 155 | | X | X | | |
| 120 | 71 | 156 | X | | X | | |
| 121 | 72 | 157 | X | | X | | |
| 122 | 73 | 158 | X | | X | | |
| 123 | 74 | 159 | X | | X | | |
| 124 | 75 | 160 | X | | X | | |
| 125 | 76 | 161 | X | | X | | |
| 126 | 77 | 162 | X | | X | | |
| 127 | 78 | 163 | X | | X | | |
| 131 | 79 | 164 | | X | X | | |
| 132 | 80 | 165 | X | | X | | |
| 136 | 81 | 166 | X | | X | | |
| 138 | 82 | 167 | X | | X | | |
| 139 | 57 | 142 | X | | X | | |

TABLE 85
Summary of eukaryotic cell data for some of the Cas9 orthologs

| | % NHEJ Mutant Alleles | |
|---|---|---|
| Cas9 | | HEK293 |

| | | |
|---|---|---|
| Ortholog | Zea mays | Expression |

| ID# | Transient | Stables | Cassette | RNP |
|---|---|---|---|---|
| 3 | 0.00% | | 0.06% | 0.00% |
| 4 | 0.00% | | 0.00% | 0.00% |
| 5 | 0.00% | | 0.00% | 0.00% |
| 6 | 0.00% | | 0.29% | 3.02% |
| 8 | 0.00% | | 3.32% | 0.00% |
| 12 | 0.00% | | 0.00% | 0.00% |
| 13 | 0.00% | | 0.00% | 0.00% |
| 17 | 0.00% | | 1.52% | 0.00% |
| 18 | 0.00% | | 0.00% | 0.00% |
| 19 | 0.00% | | 0.07% | 0.00% |
| 27 | 0.00% | | 1.34% | 0.62% |
| 30 | 0.00% | | 0.00% | 0.00% |
| 33 | 1.20% | 43.75% | 5.32% | 28.40% |
| 35 | 0.00% | | 0.30% | 0.00% |
| 41 | 0.00% | | 0.00% | 0.00% |
| 46 | * | | 30.36% | 9.22% |
| 48 | 0.30% | | 4.05% | 0.00% |
| 50 | 0.22% | | 0.88% | 0.00% |
| 56 | 0.00% | | 17.13% | 0.00% |
| 61 | 0.18% | | 0.20% | 0.00% |
| 63 | 0.23% | | 0.00% | 0.00% |
| 64 | 0.43% | 50.39% | 4.00% | 6.45% |
| 67 | 0.00% | | 0.00% | 0.33% |
| 68 | 0.00% | | 2.67% | 0.85% |
| 70 | 0.24% | | 0.00% | 0.00% |
| 77 | 0.00% | | 0.26% | 0.00% |
| 78 | 0.00% | | 1.27% | 0.00% |
| 79 | 0.00% | | 3.34% | 0.92% |
| 80 | 0.07% | | 0.00% | 0.00% |
| 81 | 0.00% | | 0.00% | 0.00% |
| 87 | 0.00% | | 0.00% | 0.00% |
| 94 | 0.00% | | 0.00% | 0.00% |
| SpCas9 | 0.58% | 41.13% | 21.57% | 87.45% |

% NHEJ mutant alleles for transient and stably transformed plants (averaged across one to three loci: MS26, MS45, and Lig), HEK293 cells transformed with DNA expression cassettes (averaged across two loci: WTAP and RunX1), and HEK293 cells transformed with RNP (ribonucleoprotein comprising Cas9 protein and sgRNA polyribonucleotide) for one locus (WTAP).
S. pyogenes Cas9 was tested in parallel as a comparator.
* indicates that heat shock is likely required for optimal activity in plants.

TABLE 86A
Cas9 Ortholog Amino Acid Position Scoring

| SpCas9 | Amino Acid | | | | | | | | | |
|---|---|---|---|---|---|---|---|---|---|---|
| Position | A | R | N | D | [symbol] | [symbol] | E | G | H | I |
| 13 | 0.00 | 0.00 | 0.00 | 0.00 | 0.00 | 0.00 | 0.00 | [symbol] | 0.00 | ● 0.51 |
| 21 | 0.00 | 0.00 | [symbol] | 0.00 | 0.00 | 0.00 | 0.00 | 0.00 | 0.00 | ● 0.47 |
| 71 | 0.00 | −0.16 | −0.17 | 0.00 | 0.00 | [symbol] | 0.00 | 0.00 | [symbol] | 0.00 |
| 149 | 0.15 | 0.00 | 0.00 | 0.00 | 0.00 | 0.00 | [symbol] | 0.00 | [symbol] | −0.24 |
| 150 | −0.07 | 0.00 | 0.00 | −0.09 | 0.00 | 0.00 | −0.14 | 0.00 | 0.00 | 0.00 |
| 444 | −0.10 | 0,00 | 0.00 | 0.00 | 0.00 | 0.00 | 0.00 | 0.00 | 0.00 | −0.24 |
| 445 | [symbol] | [symbol] | 0.11 | 0.00 | 0.00 | 0.00 | 0.00 | 0.00 | [symbol] | [symbol] |
| 503 | 0.00 | 0.00 | 0.00 | [symbol] | 0.00 | [symbol] | [symbol] | 0.00 | 0.00 | −0.07 |
| 587 | 0.00 | 0.00 | 0.00 | 0.00 | [symbol] | 0.00 | 0.00 | 0.00 | 0.00 | 0.07 |
| 620 | ● 0.54 | [symbol] | 0.00 | −0.10 | 0.00 | −0.07 | 0.00 | −0.07 | [symbol] | −0.24 |
| 623 | −0.07 | 0.00 | [symbol] | 0.00 | 0.00 | 0.00 | 0.00 | 0.00 | −0.21 | −0.10 |
| 624 | 0.00 | [symbol] | 0.00 | [symbol] | 0.00 | 0.14 | 0.00 | 0.00 | 0.00 | −0.07 |
| 632 | 0.11 | 0.00 | 0.00 | 0.00 | 0.00 | 0.00 | 0.00 | −0.07 | 0.00 | ● 0.55 |
| 692 | 0.00 | −0.17 | −0.09 | −0.07 | 0.00 | ● 0.50 | 0.00 | 0.00 | [symbol] | 0.00 |
| 702 | −0.10 | 0.00 | 0.00 | [symbol] | 0.00 | 0.00 | 0.00 | −0.07 | 0.00 | 0.00 |
| 781 | 0.00 | −0.07 | 0.00 | 0.00 | 0.00 | [symbol] | [symbol] | [symbol] | 0.00 | ● 0.44 |
| 810 | [symbol] | −0.24 | [symbol] | [symbol] | 0.00 | 0.00 | 0.00 | 0.00 | 0.00 | 0.00 |
| 908 | 0.00 | 0.00 | 0.11 | 0.00 | 0.00 | [symbol] | [symbol] | 0.00 | 0.00 | −0.17 |
| 931 | [symbol] | 0.00 | 0.00 | 0.00 | 0.00 | 0.00 | 0.00 | 0.00 | 0.00 | 0.04 |
| 933 | [symbol] | −0.07 | ● 0.40 | [symbol] | 0.00 | ● 0.36 | −0.17 | [symbol] | [symbol] | −0.07 |
| 954 | 0.00 | −0.24 | −0.20 | 0.00 | 0.00 | −0.07 | −0.14 | 0.14 | −0.10 | 0.00 |
| 955 | 0.00 | 0.00 | 0.00 | 0.00 | 0.00 | 0.00 | 0.00 | 0.00 | 0.00 | −0.48 |
| 1000 | [symbol] | 0.04 | 0.00 | 0.00 | [symbol] | [symbol] | 0.07 | [symbol] | 0.00 | [symbol] |
| 1100 | −0.17 | 0.00 | 0.00 | 0.00 | 0.00 | −0.10 | 0.00 | 0.00 | 0.00 | 0.00 |
| 1232 | 0.00 | 0.00 | 0.11 | [symbol] | 0.00 | 0.00 | [symbol] | [symbol] | −0.14 | 0.00 |
| 1236 | [symbol] | 0.00 | [symbol] | 0.00 | [symbol] | 0.00 | 0.00 | 0.00 | 0.00 | ● 0.51 |

| SpCas9 | Amino Acid | | | | | | | |
|---|---|---|---|---|---|---|---|---|
| Position | L | K | M | F | P | S | | [symbol] |
| 13 | [symbol] | 0.00 | 0.00 | 0.00 | 0.00 | −0.14 | | [symbol] |
| 21 | 0.18 | 0.00 | 0.00 | 0.00 | 0.00 | [symbol] | | [symbol] |
| 71 | ● 0.44 | 0.00 | 0.00 | 0.00 | 0.00 | 0.00 | | [symbol] |
| 149 | ● 0.40 | 0.00 | 0.00 | −0.10 | 0.00 | 0.00 | | [symbol] |
| 150 | 0.00 | 0.00 | 0.00 | 0.00 | 0.00 | ● 0.51 | | [symbol] |
| 444 | ● 0.44 | [symbol] | [symbol] | 0.04 | 0.00 | 0.00 | | [symbol] |
| 445 | 0.00 | −0.07 | −0.07 | −0.34 | 0.00 | [symbol] | ● | [symbol] |
| 503 | −0.07 | 0.11 | 0.00 | [symbol] | ● 0.40 | [symbol] | | [symbol] |
| 587 | −0.17 | 0.00 | [symbol] | ● 0.41 | 0.00 | [symbol] | | [symbol] |
| 620 | 0.00 | 0.00 | 0.00 | 0.00 | 0.00 | −0.07 | | [symbol] |
| 623 | ● [symbol] | 3.00 | −0.07 | −0.07 | 0.00 | −0.14 | | [symbol] |
| 624 | −0.14 | −0.0 [symbol] | 0.00 | 0.00 | 0.00 | −0.17 | ● | [symbol] |
| 632 | −0.24 | −0.0 [symbol] | 0.00 | −0.14 | 0.00 | 0.00 | | [symbol] |
| 692 | −0.10 | −0.07 | 0.00 | 0.00 | [symbol] | 0.00 | | [symbol] |
| 702 | ● 0.62 | 0.00 | [symbol] | [symbol] | 0.00 | [symbol] | | [symbol] |
| 781 | −0.10 | [symbol] | 0.07 | 0.00 | 0.00 | 0.00 | | [symbol] |
| 810 | 0.00 | ● 0.41 | [symbol] | 0.00 | 0.00 | 0.00 | | [symbol] |
| 908 | ● 0.48 | 0.00 | [symbol] | −0.14 | 0.00 | 0.00 | | [symbol] |
| 931 | −0.06 | 0.00 | 3.00 | 0.00 | 0.00 | 0.00 | | [symbol] |
| 933 | [symbol] | −0.10 | 0.00 | 0.00 | 0.00 | [symbol] | | [symbol] |
| 954 | 0.00 | ● 0.47 | 0.00 | 0.00 | 0.00 | [symbol] | | [symbol] |
| 955 | 0.00 | 0.00 | 0.00 | 0.00 | 0.00 | 0.00 | | [symbol] |
| 1000 | −0.07 | ● 0.44 | 0.00 | [symbol] | 0.00 | [symbol] | | [symbol] |
| 1100 | −0.03 | −0.07 | 0.00 | 0.00 | −0.21 | [symbol] | | [symbol] |
| 1232 | 0.00 | −0.06 | 0.00 | −0.10 | [symbol] | −0.07 | | [symbol] |
| 1236 | 0.11 | 0.00 | 0.00 | −0.21 | 0.00 | 0.00 | | [symbol] |

Scoring of specific amino acid positions of individual Cas9 orthologs (referenced versus the position in the SpyCas9 sequence SEQID NO: 1125). The overall fraction of each amino acid at each position in the active and non-active datasets was defined by summing and dividing by the total number in each dataset, respectively. Then, the non-active dataset was subtracted from the active with positive values indicating conserved amino acids in the active Cas9s that were under-represented in the non-active collection. Final scores >= 0.25 are indicated with a ● (circular) symbol, and were used to create “fingerprints” to identify active Cas9 orthologs. [symbol]
indicates data missing or illegible when filed

TABLE 86B
Active Cas9 ortholog fingerprints

| Relative | Amino |
|---|---|
| Position | Acid |
| 13 | I |
| 21 | I |
| 71 | L |
| 149 | L |
| 150 | S |
| 444 | L |
| 445 | T |
| 503 | P |
| 587 | F |
| 620 | A |
| 623 | L |
| 624 | T |
| 632 | I |
| 692 | Q |
| 702 | L |
| 781 | I |
| 810 | K |
| 908 | L |
| 931 | V |
| 933 | N or Q |
| 954 | K |
| 955 | V |
| 1000 | K |
| 1100 | V |
| 1232 | Y |
| 1236 | I |

Signature amino acid residues for orthologs possessing a higher probability of activity in eukaryotic cells. Position numbers are with respect to the analogous amino acid position numbers of S. pyogenes Cas9 (SEQID NO: 1125). Orthologs with positive cutting activity in eukaryotic cells comprise one or more of these structural features.

TABLE 86C
Cas9 ortholog amino acid position total score (sums)

| PRT ID | Total |
|---|---|
| SEQ | Score |
| 527 | 11.64 |
| 116 | 11.43 |
| 860 | 11.19 |
| 868 | 11.09 |
| 115 | 10.69 |
| 160 | 10.66 |
| 162 | 10.65 |
| 666 | 10.25 |
| 821 | 10.25 |
| 633 | 10.21 |
| 514 | 10.18 |
| 105 | 10.15 |
| 922 | 10.07 |
| 169 | 9.85 |
| 526 | 9.85 |
| 168 | 9.73 |
| 660 | 9.70 |
| 1102 | 9.64 |
| 756 | 9.59 |
| 978 | 9.43 |
| 589 | 9.30 |
| 726 | 9.30 |
| 1038 | 9.30 |
| 942 | 9.26 |
| 113 | 9.26 |
| 161 | 9.26 |
| 681 | 9.26 |
| 1049 | 9.16 |
| 938 | 9.09 |
| 898 | 8.98 |
| 158 | 8.90 |
| 777 | 8.90 |
| 891 | 8.86 |
| 120 | 8.83 |
| 946 | 8.83 |
| 937 | 8.79 |
| 944 | 8.79 |
| 1031 | 8.79 |
| 865 | 8.75 |
| 156 | 8.73 |
| 762 | 8.73 |
| 833 | 8.71 |
| 747 | 8.71 |
| 842 | 8.71 |
| 732 | 8.60 |
| 935 | 8.57 |
| 967 | 8.54 |
| 893 | 8.47 |
| 1005 | 8.46 |
| 885 | 8.39 |
| 110 | 8.37 |
| 125 | 8.36 |
| 157 | 8.32 |
| 691 | 8.32 |
| 697 | 8.32 |
| 801 | 8.32 |
| 1121 | 8.32 |
| 1122 | 8.32 |
| 1123 | 8.28 |
| 953 | 8.25 |
| 793 | 8.11 |
| 877 | 7.97 |
| 1076 | 7.89 |
| 111 | 7.88 |
| 911 | 7.87 |
| 669 | 7.84 |
| 630 | 7.84 |
| 799 | 7.84 |
| 1032 | 7.84 |
| 1039 | 7.84 |
| 1048 | 7.80 |
| 741 | 7.77 |
| 121 | 7.75 |
| 624 | 7.71 |
| 112 | 7.58 |
| 101 | 7.50 |
| 114 | 7.50 |
| 966 | 7.48 |
| 586 | 7.44 |
| 124 | 7.44 |
| 155 | 7.44 |
| 690 | 7.44 |
| 636 | 7.40 |
| 623 | 7.36 |
| 1072 | 7.31 |
| 713 | 7.29 |
| 722 | 7.22 |
| 1064 | 7.18 |
| 916 | 7.18 |
| 688 | 7.16 |
| 725 | 7.14 |
| 934 | 7.00 |
| 628 | 6.99 |
| 1120 | 6.99 |
| 861 | 6.97 |
| 862 | 6.97 |
| 1126 | 6.97 |
| 841 | 6.90 |
| 546 | 6.89 |
| 1059 | 6.86 |
| 1028 | 6.83 |
| 981 | 6.80 |
| 1042 | 6.76 |
| 939 | 6.76 |
| 678 | 6.75 |
| 754 | 6.71 |
| 913 | 6.68 |
| 999 | 6.67 |
| 751 | 6.59 |
| 159 | 6.53 |
| 570 | 6.53 |
| 571 | 6.52 |
| 531 | 6.51 |
| 985 | 6.51 |
| 948 | 6.50 |
| 949 | 6.50 |
| 792 | 6.34 |
| 849 | 6.34 |
| 759 | 6.33 |
| 716 | 6.33 |
| 941 | 6.32 |
| 848 | 6.32 |
| 117 | 6.31 |
| 553 | 6.29 |
| 835 | 6.28 |
| 1045 | 6.27 |
| 808 | 6.27 |
| 118 | 6.23 |
| 598 | 6.17 |
| 604 | 6.17 |
| 1134 | 6.10 |
| 790 | 6.09 |
| 519 | 6.08 |
| 140 | 6.06 |
| 774 | 6.06 |
| 795 | 6.02 |
| 972 | 5.95 |
| 106 | 5.93 |
| 587 | 5.92 |
| 731 | 5.91 |
| 100 | 5.90 |
| 1023 | 5.90 |
| 592 | 5.90 |
| 122 | 5.88 |
| 708 | 5.85 |
| 855 | 5.84 |
| 138 | 5.74 |
| 512 | 5.70 |
| 932 | 5.67 |
| 143 | 5.66 |
| 980 | 5.64 |
| 648 | 5.64 |
| 856 | 5.62 |
| 680 | 5.61 |
| 661 | 5.56 |
| 664 | 5.53 |
| 735 | 5.51 |
| 727 | 5.48 |
| 679 | 5.47 |
| 993 | 5.47 |
| 802 | 5.45 |
| 936 | 5.44 |
| 826 | 5.42 |
| 126 | 5.40 |
| 559 | 5.40 |
| 590 | 5.40 |
| 592 | 5.40 |
| 1117 | 5.40 |
| 539 | 5.39 |
| 729 | 5.38 |
| 797 | 5.37 |
| 780 | 5.37 |
| 654 | 5.34 |
| 104 | 5.32 |
| 927 | 5.30 |
| 139 | 5.30 |
| 918 | 5.30 |
| 1050 | 5.23 |
| 619 | 5.20 |
| 1074 | 5.17 |
| 812 | 5.16 |
| 764 | 5.16 |
| 1043 | 5.16 |
| 164 | 5.15 |
| 883 | 5.15 |
| 1044 | 5.13 |
| 904 | 5.13 |
| 782 | 5.12 |
| 851 | 5.09 |
| 683 | 5.09 |
| 1026 | 5.05 |
| 1037 | 5.05 |
| 1078 | 5.05 |
| 564 | 5.02 |
| 1133 | 5.02 |
| 103 | 5.01 |
| 1016 | 5.01 |
| 1047 | 4.98 |
| 1114 | 4.96 |
| 970 | 4.89 |
| 684 | 4.87 |
| 108 | 4.85 |
| 1015 | 4.82 |
| 102 | 4.79 |
| 1068 | 4.78 |
| 123 | 4.71 |
| 750 | 4.69 |
| 715 | 4.66 |
| 518 | 4.62 |
| 806 | 4.61 |
| 1004 | 4.60 |
| 659 | 4.59 |
| 580 | 4.58 |
| 884 | 4.57 |
| 552 | 4.54 |
| 987 | 4.53 |
| 947 | 4.50 |
| 603 | 4.50 |
| 693 | 4.42 |
| 765 | 4.42 |
| 668 | 4.41 |
| 794 | 4.39 |
| 882 | 4.35 |
| 1099 | 4.33 |
| 820 | 4.32 |
| 881 | 4.31 |
| 653 | 4.30 |
| 1056 | 4.28 |
| 924 | 4.27 |
| 811 | 4.26 |
| 903 | 4.26 |
| 788 | 4.24 |
| 901 | 4.24 |
| 958 | 4.24 |
| 1135 | 4.24 |
| 674 | 4.22 |
| 540 | 4.21 |
| 1086 | 4.21 |
| 1025 | 4.19 |
| 658 | 4.17 |
| 998 | 4.17 |
| 152 | 4.16 |
| 656 | 4.16 |
| 888 | 4.13 |
| 1036 | 4.13 |
| 839 | 4.10 |
| 1082 | 4.10 |
| 543 | 4.09 |
| 513 | 4.08 |
| 706 | 4.07 |
| 1041 | 4.07 |
| 1077 | 4.07 |
| 1106 | 4.07 |
| 1061 | 4.06 |
| 532 | 4.06 |
| 1014 | 4.02 |
| 990 | 4.01 |
| 1128 | 4.01 |
| 90 | 3.98 |
| 1092 | 3.96 |
| 807 | 3.94 |
| 119 | 3.94 |
| 614 | 3.91 |
| 572 | 3.88 |
| 815 | 3.87 |
| 850 | 3.87 |
| 602 | 3.85 |
| 745 | 3.85 |
| 757 | 3.85 |
| 634 | 3.85 |
| 579 | 3.84 |
| 804 | 3.84 |
| 895 | 3.84 |
| 109 | 3.83 |
| 695 | 3.83 |
| 1008 | 3.83 |
| 696 | 3.81 |
| 1001 | 3.81 |
| 637 | 3.81 |
| 1115 | 3.81 |
| 890 | 3.80 |
| 854 | 3.80 |
| 520 | 3.79 |
| 542 | 3.79 |
| 710 | 3.79 |
| 749 | 3.76 |
| 1067 | 3.74 |
| 737 | 3.72 |
| 772 | 3.72 |
| 892 | 3.71 |
| 723 | 3.70 |
| 789 | 3.69 |
| 515 | 3.69 |
| 853 | 3.69 |
| 926 | 3.69 |
| 1130 | 3.69 |
| 551 | 3.68 |
| 907 | 3.68 |
| 530 | 3.66 |
| 1010 | 3.66 |
| 852 | 3.64 |
| 1131 | 3.64 |
| 711 | 3.63 |
| 845 | 3.62 |
| 641 | 3.59 |
| 997 | 3.58 |
| 613 | 3.57 |
| 910 | 3.57 |
| 718 | 3.57 |
| 923 | 3.56 |
| 720 | 3.55 |
| 873 | 3.55 |
| 134 | 3.54 |
| 902 | 3.53 |
| 1085 | 3.49 |
| 876 | 3.48 |
| 810 | 3.47 |
| 989 | 3.46 |
| 955 | 3.45 |
| 961 | 3.45 |
| 107 | 3.44 |
| 145 | 3.44 |
| 976 | 3.44 |
| 612 | 3.43 |
| 701 | 3.39 |
| 167 | 3.37 |
| 582 | 3.37 |
| 640 | 3.36 |
| 781 | 3.36 |
| 1080 | 3.34 |
| 599 | 3.33 |
| 871 | 3.33 |
| 1058 | 3.33 |
| 896 | 3.32 |
| 98 | 3.32 |
| 151 | 3.30 |
| 714 | 3.29 |
| 859 | 3.29 |
| 1081 | 3.29 |
| 712 | 3.28 |
| 736 | 3.28 |
| 1009 | 3.28 |
| 1097 | 3.27 |
| 525 | 3.26 |
| 717 | 3.25 |
| 837 | 3.25 |
| 730 | 3.25 |
| 803 | 3.25 |
| 899 | 3.24 |
| 607 | 3.23 |
| 645 | 3.22 |
| 631 | 3.21 |
| 719 | 3.21 |
| 840 | 3.21 |
| 1002 | 3.21 |
| 1105 | 3.21 |
| 769 | 3.20 |
| 1066 | 3.19 |
| 141 | 3.19 |
| 707 | 3.18 |
| 878 | 3.18 |
| 127 | 3.17 |
| 153 | 3.17 |
| 600 | 3.17 |
| 644 | 3.17 |
| 657 | 3.17 |
| 945 | 3.17 |
| 874 | 3.15 |
| 569 | 3.15 |
| 132 | 3.14 |
| 606 | 3.14 |
| 767 | 3.14 |
| 784 | 3.14 |
| 148 | 3.13 |
| 791 | 3.12 |
| 1024 | 3.12 |
| 705 | 3.12 |
| 996 | 3.11 |
| 879 | 3.11 |
| 521 | 3.10 |
| 758 | 3.10 |
| 1019 | 3.10 |
| 575 | 3.10 |
| 813 | 3.10 |
| 574 | 3.09 |
| 694 | 3.09 |
| 662 | 3.07 |
| 535 | 3.07 |
| 561 | 3.07 |
| 621 | 3.07 |
| 629 | 3.06 |
| 900 | 3.06 |
| 1017 | 3.05 |
| 1073 | 3.05 |
| 994 | 3.03 |
| 563 | 3.03 |
| 1003 | 3.02 |
| 905 | 3.00 |
| 635 | 3.00 |
| 1087 | 2.98 |
| 544 | 2.95 |
| 558 | 2.95 |
| 626 | 2.95 |
| 651 | 2.89 |
| 773 | 2.89 |
| 685 | 2.88 |
| 1006 | 2.88 |
| 618 | 2.88 |
| 699 | 2.86 |
| 1112 | 2.86 |
| 822 | 2.85 |
| 912 | 2.84 |
| 144 | 2.83 |
| 1055 | 2.83 |
| 150 | 2.82 |
| 528 | 2.82 |
| 591 | 2.82 |
| 703 | 2.82 |
| 779 | 2.82 |
| 1051 | 2.82 |
| 649 | 2.81 |
| 880 | 2.81 |
| 954 | 2.81 |
| 165 | 2.81 |
| 1011 | 2.81 |
| 909 | 2.80 |
| 829 | 2.79 |
| 692 | 2.78 |
| 1060 | 2.78 |
| 858 | 2.78 |
| 163 | 2.77 |
| 663 | 2.77 |
| 671 | 2.76 |
| 771 | 2.75 |
| 889 | 2.74 |
| 920 | 2.74 |
| 1098 | 2.74 |
| 131 | 2.74 |
| 1046 | 2.74 |
| 545 | 2.71 |
| 550 | 2.71 |
| 805 | 2.71 |
| 984 | 2.71 |
| 166 | 2.71 |
| 1915 | 2.70 |
| 1040 | 2.70 |
| 875 | 2.69 |
| 796 | 2.69 |
| 665 | 2.68 |
| 755 | 2.68 |
| 770 | 2.67 |
| 969 | 2.67 |
| 1089 | 2.67 |
| 1116 | 2.67 |
| 555 | 2.66 |
| 639 | 2.66 |
| 724 | 2.66 |
| 931 | 2.66 |
| 977 | 2.66 |
| 1033 | 2.66 |
| 785 | 2.66 |
| 872 | 2.66 |
| 1090 | 2.66 |
| 869 | 2.65 |
| 963 | 2.65 |
| 1091 | 2.65 |
| 929 | 2.64 |
| 541 | 2.64 |
| 617 | 2.64 |
| 787 | 2.64 |
| 1118 | 2.64 |
| 687 | 2.63 |
| 908 | 2.63 |
| 930 | 2.63 |
| 1027 | 2.63 |
| 744 | 2.61 |
| 128 | 2.60 |
| 800 | 2.60 |
| 832 | 2.60 |
| 952 | 2.58 |
| 738 | 2.58 |
| 549 | 2.51 |
| 921 | 2.48 |
| 917 | 2.44 |
| 135 | 2.42 |
| 154 | 2.42 |
| 524 | 2.42 |
| 677 | 2.42 |
| 136 | 2.41 |
| 914 | 2.41 |
| 968 | 2.41 |
| 988 | 2.41 |
| 743 | 2.37 |
| 825 | 2.37 |
| 950 | 2.37 |
| 1030 | 2.37 |
| 129 | 2.36 |
| 1034 | 2.36 |
| 646 | 2.35 |
| 1093 | 2.35 |
| 1107 | 2.34 |
| 616 | 2.31 |
| 1053 | 2.31 |
| 816 | 2.31 |
| 1070 | 2.31 |
| 557 | 2.30 |
| 979 | 2.30 |
| 601 | 2.27 |
| 632 | 2.27 |
| 846 | 2.27 |
| 538 | 2.27 |
| 596 | 2.27 |
| 578 | 2.26 |
| 951 | 2.26 |
| 986 | 2.26 |
| 96 | 2.25 |
| 522 | 2.25 |
| 965 | 2.25 |
| 995 | 2.25 |
| 137 | 2.24 |
| 831 | 2.24 |
| 605 | 2.24 |
| 608 | 2.24 |
| 728 | 2.24 |
| 1021 | 2.24 |
| 566 | 2.23 |
| 638 | 2.23 |
| 667 | 2.23 |
| 763 | 2.23 |
| 894 | 2.23 |
| 1095 | 2.23 |
| 886 | 2.22 |
| 146 | 2.20 |
| 643 | 2.20 |
| 838 | 2.20 |
| 130 | 2.20 |
| 974 | 2.19 |
| 992 | 2.19 |
| 1012 | 2.18 |
| 1096 | 2.17 |
| 573 | 2.16 |
| 625 | 2.16 |
| 647 | 2.16 |
| 709 | 2.16 |
| 866 | 2.16 |
| 897 | 2.16 |
| 1007 | 2.16 |
| 93 | 2.14 |
| 748 | 2.14 |
| 957 | 2.14 |
| 827 | 2.13 |
| 870 | 2.13 |
| 686 | 2.09 |
| 702 | 2.09 |
| 533 | 2.05 |
| 99 | 2.01 |
| 565 | 1.98 |
| 828 | 1.98 |
| 1065 | 1.98 |
| 534 | 1.97 |
| 1020 | 1.96 |
| 971 | 1.94 |
| 133 | 1.91 |
| 568 | 1.91 |
| 834 | 1.91 |
| 588 | 1.90 |
| 991 | 1.90 |
| 1022 | 1.90 |
| 887 | 1.89 |
| 562 | 1.87 |
| 576 | 1.87 |
| 581 | 1.87 |
| 654 | 1.87 |
| 1013 | 1.87 |
| 1124 | 1.87 |
| 776 | 1.86 |
| 973 | 1.86 |
| 149 | 1.85 |
| 778 | 1.84 |
| 1109 | 1.84 |
| 547 | 1.84 |
| 761 | 1.84 |
| 857 | 1.84 |
| 1110 | 1.84 |
| 94 | 1.83 |
| 584 | 1.83 |
| 1052 | 1.83 |
| 672 | 1.83 |
| 523 | 1.82 |
| 682 | 1.82 |
| 844 | 1.81 |
| 740 | 1.80 |
| 823 | 1.80 |
| 610 | 1.80 |
| 620 | 1.80 |
| 1088 | 1.80 |
| 1101 | 1.80 |
| 611 | 1.79 |
| 847 | 1.79 |
| 843 | 1.77 |
| 676 | 1.76 |
| 1083 | 1.76 |
| 863 | 1.76 |
| 142 | 1.75 |
| 906 | 1.75 |
| 1069 | 1.75 |
| 964 | 1.74 |
| 760 | 1.73 |
| 940 | 1.73 |
| 975 | 1.73 |
| 1000 | 1.73 |
| 1057 | 1.73 |
| 583 | 1.72 |
| 721 | 1.72 |
| 673 | 1.69 |
| 1094 | 1.68 |
| 698 | 1.66 |
| 536 | 1.66 |
| 943 | 1.66 |
| 961 | 1.66 |
| 1062 | 1.66 |
| 819 | 1.65 |
| 556 | 1.64 |
| 742 | 1.64 |
| 798 | 1.64 |
| 140 | 1.57 |
| 675 | 1.54 |
| 739 | 1.53 |
| 704 | 1.51 |
| 1104 | 1.49 |
| 595 | 1.47 |
| 92 | 1.46 |
| 529 | 1.46 |
| 959 | 1.46 |
| 768 | 1.45 |
| 91 | 1.43 |
| 1018 | 1.42 |
| 86 | 1.40 |
| 88 | 1.40 |
| 516 | 1.40 |
| 609 | 1.40 |
| 689 | 1.40 |
| 1132 | 1.40 |
| 537 | 1.39 |
| 560 | 1.39 |
| 567 | 1.39 |
| 818 | 1.39 |
| 830 | 1.39 |
| 1108 | 1.38 |
| 594 | 1.36 |
| 622 | 1.36 |
| 753 | 1.36 |
| 1113 | 1.36 |
| 1129 | 1.36 |
| 577 | 1.33 |
| 1119 | 1.33 |
| 95 | 1.32 |
| 97 | 1.32 |
| 752 | 1.32 |
| 786 | 1.32 |
| 1071 | 1.32 |
| 650 | 1.31 |
| 734 | 1.31 |
| 983 | 1.31 |
| 147 | 1.29 |
| 517 | 1.29 |
| 814 | 1.29 |
| 867 | 1.28 |
| 864 | 1.10 |
| 982 | 1.06 |
| 89 | 0.99 |
| 548 | 0.99 |
| 585 | 0.99 |
| 597 | 0.99 |
| 670 | 0.99 |
| 700 | 0.99 |
| 746 | 0.99 |
| 783 | 0.99 |
| 615 | 0.96 |
| 642 | 0.96 |
| 733 | 0.96 |
| 956 | 0.96 |
| 652 | 0.95 |
| 766 | 0.95 |
| 925 | 0.95 |
| 1084 | 0.95 |
| 1111 | 0.95 |
| 836 | 0.94 |
| 1029 | 0.92 |
| 1075 | 0.92 |
| 933 | 0.91 |
| 809 | 0.88 |
| 919 | 0.88 |
| 1054 | 0.88 |
| 1079 | 0.88 |
| 87 | 0.48 |
| 554 | 0.48 |
| 627 | 0.48 |
| 775 | 0.48 |
| 817 | 0.48 |
| 824 | 0.48 |
| 1063 | 0.48 |
| 1100 | 0.48 |
| 1103 | 0.48 |
| 928 | 0.40 |
| 960 | 0.40 |

Cas9 orthologs scoring, with total scores per ortholog PRT SEQID, based on sums of scores of positions identified in Table 86A.

The application's sequence listing, which the Patent Office published only in electronic form, follows.

SEQUENCE LISTING (1829 sequences)

SEQ ID NO: 1 - DNA, 4143 bp, Prevotella histicola
  source 1..4143: mol_type = unassigned DNA
atgaagaagattctgggattagacttagggactacaagcattggttgggccttagtatatgagagtgagaatgcagatgaaaaatcatctatagttagacttggtgtgagggttaatcctttaagtgtagatgaaaaaggcaactttgaaaaaggcaaatctattacaactaatgctgataggcagcaaacccatggtgcaaggataaacctccagcgctataaattacgtagagagaatcttaaagattgtctgcagaaacaaggttggattggaacagaggcattgtatgaagaggggaaaacttctacttttgaaacctatatgttacgtgcaaaagctgcagaagaagagatatcattacatgaactctgtcgagttctgtttatgctgaataagaaacgtggctataagagtaatcgaaaggcaaataataaagaagatggaaagctttttgatggaatgactgttgccaaaaaactctatgaagagcacttaactcctgcagaatattcactcaaattacttagtagtgggaagaagtttaagcaagagtactatcgttccgatctaaaagaagagttcgatagaatatggaatgagcagcagaagtactatcctgagatacttacggatgattttaaacagcagttgcaaggaaaatcaaagggaaatacaagtaagattttccttggtaaatatggtatttactctgcagatttaaaaggtctggataggaagttacaacctttgaaatggagggttgaagcgttgaaacagaaggtcgataaggaggtcttagcctttgttattagtgatttgaatgggcaaatagccagtacaagtggactgcttggtgctattagtgacagaagtaaagagctctactttaataaacagacagttggtcaatacctatggacttctttaaaagaaagtccacatgtaagtattaagaataaacctttctatcgtcaagactatttagatgaatttgaaaagatctgggagacgcaagcaacctatcataaggaactaactcctgaattgaagcaagaaatcagagatataattatcttttatcagcgaccattgaagagtaagaaggggctgatttcagtgtgtgagcttgaacaacgtaaggtaaaagtaactattgatgggaaagaaaaagaaatatctatcggtccgaaggttgcccctaagtcttctccaatgtttcaagagtttagaatttggcagaacctaaataatatactacttatagacaaaggaaataatagtaatcgtcctctgtacgaggaagagagaaatttattatatgaggaactaagtgttaaggagaaacttagtaaagctgaggctctaaaagtattgaacaagaatggtaaacaatgggatctgaattataaagaaatagaaggcaatcgtactcaggctgtcctctatgactgttataatcgaattatagggatgacgggacatgaagaatgtaatttcaaaaaactaaaagcctctgatattcgctataatgttaagacgatattcaagaatttaggtttcagtacagatatactagactttgactcatcactacaaggccatgagttggaaagacaaccttcgtatcagctttggcatctgttgtattcttatgaaagtgataactctcgaacaggtaatgatgctttattaaggaagttggagacagcatttagcattcctaaagaatatgcagcagtactttctgatgtggtctttgaggacagttatgggaatcttagtgtgaaggcaatgcgtaatatcttaccacatttgcaagcaggattagattatagtcaagcatgtgaaaaggcaggatataaacattcacgtcgctcacttacgaagaatgaactggataaaaaagaatataaggagaagttagaattattacccaagagtagtttacataatcctgttgttgagaagatactcaatcaaatgattaatgtgatcaatgcagttattgatgaatatggaaagcctgatgagataagaatagaattagctcgtgaactgaagattggagctgcagagcgagagaatatgacacgaagtattaatcaaggtaatgcagagaataaacgtattcgtgaaatactcgagaaggaatttgcactttcatatatcagtaggaatgacatcataaaatataagttatatgaagaacttaaatcgaatggctttaagactttatactctgacacgtatatatcaaaagataaactcttctcaaaagattttgatattgagcatattattccgaaagctcgtttgtttgatgattcactttcaaataagacaatcgaagcacgtgatgtaaatattgcaaagagtaataagactgcttttgattttatttctgaaaagtatgaccagcaagggattgaggcttataagaagaaactcgatattcttttgcaggatggttccattagtaaggctaagtacaatagattattaatgaaggaagcagatattccatcagggttcattgatcgtgaccttcgagatactcagtatatagcgaagaaagcgtatgaaatattaagtgacttagttaggaatgttacaccaacaacaggcgctgtgactagtcgtttgcgtgaagactggcagttagttgatgttatgaaagagcttaattttgagaagtatcaaaagttaggtttagtagaagtgatagaagatagggatggtaggaagataaagcgtataaaggattggaccaagcgtaatgaccatcgtcatcatgcgatggatgcattaacaattgcttttacgaaaccaagttatattcaatatctgaacaaccttaatgcacgaagtgataagaatagtagtatttatggcatagaaaataaagagctacatcgtgaagataacaagcttcgctttaatgctcctttgcctattaatgaatttagggcagaagctagaagacaccttaaatctatcttagtctctgttaaggcaaagaataaagtgatgacacagaatgtaaacgtgataaagacaaaacatggagtaattaaaaaggtgcaacttacgccacgtggagaattgcataatgctacattttatggaacaaagaaacgtccaataataaagatggtcaaagttggggctgcattagatgaagtaacaattaagaaagtaagtagttcctttattcgtgaggcgttgctggatagactccatgagtataatggtgatgctaagaaggcttttacaggaagaaattcaatagataagaaccctatttatatagatgaagagcacaaaaagactgttccagcattggttaaaacgatagagtgggagatgtatcaccctactcgaaagatgatatcaccagatcttaaaattgacaaagttatagataaaggtatacgagaaatcttaagaactcggttagcaaaatttaatggtgatgcccagaaggcctttagtaatttagatgaaaatcctatttataaggatgaagcaaagaagataaccttgaagcgagtcagccttgaaggagtttcaagtgtaattccgctacacaaacttaaggatatgggaggaaagccagttgttggaaaggatgggaagccggtatggggtgattatgttcaaacaagtaacaatcatcatattgctttttacatggatgagaatggtaacctgcaagatgatgtagtaaccttctttaaagctgcgaggcgtaaatcacaaggagtacccgttattgataagaactataatcacgataaaggttggcatttcctatttacaatgaagcaaaacgaatattttgtgttccctaatgaagcgacagggtttattcctaccgaagtggatttaatggacgaagccaattatgacatgataagtccaaatctatacagagttcaaaagatgtcaaaaacaaaacaaggcataaccgacaagagggattattggtttagacatcatttagagacagtacttaataacgatttaaaagttaggaactctatatttaaacaaataaattcattaaagcctttagaaggtattgtaaaggtgcgcatcaatgctattggcaaaatagtggcaataggagaatacgattaa

SEQ ID NO: 2 - DNA, 4212 bp, Chryseobacterium gallinarum
  source 1..4212: mol_type = unassigned DNA
atggtggaaagaattttaggactcgacttaggagtttcttctataggctgggctcttgtagaggaagatgtgaaaaatccggaaaataacaagattataaaattaggagtaagagttaatcctttaacaatagatgagaaaaccaattttgaaaaaggtaaatctattacaactaatgccggacgtacttcagcgagaagcgcccgtaggaaccttcagcgttttaaactgagaagaaaaaaattattagagattttaattcattataaaatcataaaaaacgatgctgttctggctgaaacaggtaaaaacactactttccagacgcaatatctaagagcaaaagcggccagagaaaaaatagaactggatgaactggcaagggttcttcttctgatcaataaaaaaagaggatacaaaagcagcagaaaagtccaaaatgatgatgatggaaaagctattgacggattatcagtagcgaaggagttatatgagaaaaattataccccgggtcaatatgcctatgatcttttaaaaagagggaaaaaacagattccggatttttacagatcagatcttcaaaatgaattggatcgtatttgggaatttcaaaaacaatatcatcctgatattttaaccgatgaatttaaaaaagaacttgaaggaaagggacagagagcaactgccgctatttttctgaatcgttataaaatttacactgccgataataaaggaacacgggaagagaaaaagattcaggcttatcagtggcgagtagaggctctttctcagccattggatgttaaagaagtggcatatgtaattgcggaaattaataataatcttaataattccagtggatatcttggtgcgatcagtgatagaagtaaaaaactatattttaacggacaaacaataggagaatatctttttgaagagctttcagcgaatcctcatacccgtttgaaaaatcaggtgttttaccggcaagactatcaggatgagtttgaaaagatctggaaaatacagacaaaattccatcctgaattgactaaggaattgaaagaacaagttcgtgatattgttattttctaccaaagaaagctaaagtcacagaaagggctgataagtttttgtgaatttgaaagtagagaaattgaaattgaagaaaatggcaaaagaaaaaggaagaaggtcggattgaaagtagctcctaaatcttcacctttatttcaggaatttaaaatctggcaggttctcaataatatagaaataaagaatgaagatgaacgaaggtatttggagccggaagaaaaagaactgcttttcaatgagctgaattgtaaaggaaatcttacttcacaaaaatgcctggaacttttgggttttaaatcgaaagatgcaaaacttaattttaaagttgtggaaggaaacagaaccaatgaaaagttatatgatgcttttctgaaaattctggaactgcaaggctataatgtttttgagcttttaaaaataaaagaggataaggatgaggctaaattatctgaactgaaagcttctgctgacgagattaaagggatgataaaagagatttttaatgcaaatcttattaatacatccattcttgattttaatgcagaattggagggaaaggattttgaaaatcaggcttcttatcagttttggcatttgatgtattcttacgaaggggataattcgccatcagggaatgaaaaattatatgaattgctggagaagaaatttggctttaaaaaagaacactccaagattttatcaacgattgttttttcacaggagtatgggagcctgagtacaaaggctatgagaagaatttacccttatattaaagataataagtatagtgaagcatgtcttcttgctgggtataatcattctaagcactctttgactaaagaagaattggaaaacaggaaattaaaagagcaattggaggttttacctaaaaattctttacgaaatcctgttgttgaaaagattttaaatcagatgattaatcttgtgaatgctacaatttctgaatatggaaagttggatggagttagaatagagctagccagggagctgaagaaaagtgcacaggagcgtgaagatatggcgaagagtattaatgaagccacactccttcatcaaaaatatgcaactattttaaagcaagaatttggtgttgttaatccatccagaaatgatattatccgatacaaactatatatggaacttaccgttaacgggtataaagatctgtatactaatactaaaatagaaaaagaaaatctttttacagataagtatgatatagaccatattattccacagtcaaggttttttgatgatagtttttctaacaaggttttagttccacgacagtcaaacttagataaaggaaatctgactgcgtatgattttatgtctaataaagggagtgaaagagaagaacatttcctgaatgtaattaaagaattattggataaaggcagtatttcaaaagcaaaatatgaaaagctaaagaaaaaaggattagaaataggagatggatttatagaaagagatttgagagatactcaatatattgcaaaaaaagcaaaagaaattctttttgagattactaattctgtggtaaccacttcaggaagaatcacagacaaattaagaaaagattgggatcttgtcaatatcatgaaagaacttaatcttgataactacagaaggttaggtttaacagaaattgtcagaaattcaaaaggagaagagaaagaactcattccggattggacaaaacgtaatgatcaccgtcatcatgcaatggatgctcttaccgttgcattcactaccagaaatcatattcagtatctgaattatcttaatgcaagaaaagatgaaaagcataaagaacaccagaatatttatgctattgaaaatattattacagaagtcattgagaaaaaaaatggttcaaagaccaggagatttaaggctccaatgaatagtttcagacatgaagctaagcagcatctgaaggaaatattggtttcacataaaactaaaaataaagtagtaacctcaaatatcaataagactaagaaaaaaggagggattcataaaaaaacagaacttaccccacgaggacagcttcataaagaaacggtgtatggcagcaagaaatttctacaatcgagagaagaaaaagtatctgcaaagtttgactatgaaactatattaatggttgttaatccaatacatagaaatgcattactgaatagattgaaggaatatggaaacgatcctaaaaaggcattctcaggtaaaaatgcaataaataaaaaccctgtttacttggatgattctaagactgatattctttccgaaaaagttactctttcctggtacgagaccgggtatactattaggaaatctgttacgcctgataattttaaagactataagaatctggaaaaaataacagatcttggtataaagaaaattttaaaggaacgtcttgatcaatttaaaggaaatgcaaaagaagcattttctaatctggataaagatcctatctggctgaatgaagaaaaaggaattgcaataaaaaccgtaacgattactggtgtgagtaatgctgaatccttacactttaaaaaagatcatttgggtaaagaaattctggatgaaaatggaaataagatccccggagattttgtaagtactgggaataatcatcatttagctatttacttagatgaagaggaaaaacttgatgataaaatggttacattttatgaggcagttttaagagtaaatcaaggtttgcctgtaattgataaagactataataaggagaaagggtataagtttttaatgactttgaaacagaatgaaatgtttgtatttcctaatgaagattttgatcccaacgaaattgatctacttgatgagaggaacttagagcggatatccaagcatttatttagagttcagaaaatttcaaaggttgggtatggaaattcttttgtcagagattttgtattcaggcatcacttagaaacaaccgttgaagagagaaaagaactgcggaatataacctatatacagcttaaaagccttgaaggactaagaaatattataaaagtaagattgaatcacttgggaaaaatagtacaaataggtgaatattaa

SEQ ID NO: 3 - DNA, 4275 bp, Parabacteroides sp.
  source 1..4275: mol_type = unassigned DNA
atgaaaaggattttaggcttggatttagggacaaatagtatagggtgggcgttggtgaacgaagctgaaacagatgaggaagtctcgtcaatcatccgattaggtgtgagagtaaatcctttgacagtagatgaaacgcagaactttgaaaaagggaaaagtatcactacaaatgcggaaagaactcttaaaagaagtatgcgccgtaatttgcagcgatataaattacgtcgtgatgcgttggttgaatttttgaaagagctgggttttattaccgacgaaactatcctttcggaacaaggaaacagaactacgtttgaaacctgtcgtttacgggctaaagctgctgaagaagagatttctttagaggaactatcccgtgtcttattgatgattaataaaaaacgtggatataaaagtagtcgaaaggtaaaaaaggaagaagatggagttttgattgatggaatggagattgctaaaaagctgtatgaggaggatttgactccggggcaactttgttcgcagttacttgaatcgggcaagaaagttttgccagacttttaccgttctgatttgcaagaagagttggatagaatatggagtgttcaaaagcaatttcatcctgatgttttctgtgatgccgccaaagaagaaatcaaaggaaaaaacagaagccagacatgggctatcttggctaactattttgtttggaaagaagaagtggttggctggaatgacagagaagcaaagaatgaaacgatagaaaaagaatgtaaacttgtcggtcttaaacggacgactaaggggtatgaactgaaaaaggaaaattatcgttggcgtgcgcaagctcttactgaacaattaggtttggaagagatagccgtagtcttgcaagagatcaatggtcagataaatgcgtctagtggttatttgggagccattagtgataggagcaaagtgttatactttaatcatcaaacggtcggacagtatcagatggctgagttagacaagaatccccatgcaagtttgcgcaatatggtattctatcggcaggattatttggatgaatttgatagaatttgggaaaagcaggcagaatttcataaggaattgacagctgaattgaaaaaagagattcgcgatatgatcatcttttaccaacgacgtctgaaaagtcagaaaggcttgattagtttctgtgagtttgaaaggttggagattgtagtagaaaaggatggaaagaaacagaccaaagtcataggatgcaaggtgatacctcgttcgcatccattgtttcaggaatttaaggtatggcagacattgaatgacataaaggtattgggaagagagaagaaaagaaatgctttgtcggcaagcgaaagtagggctttgtatccagaagaaaaagaaatactggcaagagaacttgcgataaaagaaaacatgaagaaagcagatgtgttgaagctcttatttgaaaatccacaggaattggatttgaacttcaaacaaatagatggaaatcgtactgggttttctctcttttctgcctatagcaaaatgatagaaaagtatggctacgaaccgttggattttaagaaaccagcagatgagataatcggacagctaagaactatctttaccgatttaggttggaatacgaatctgtttaccattgacttaaccaaagaggggaaagagctcgagatgcaaccttatttcagactttggcatctgttgtattcttttgaaggagataatacgtcgaccggtaacggcaaactgattgaaaagatcatgcaactttgcggagttgagaaagaatatgctgtagagctagccagtctttcgtttcaagatgattacggaagtttgagcgcgaaagccatcaaaaggattttaccctatttgaaagagggtaatctgtatgatgtggcttgtgaatatgccggttatcgtcattccaaatcttcactgactaaggaggagatagaaaataaggttttaaagggcaagctggaggttcttcctaaaaacagtctccgaaatccggtggttgaaaagattttgagtcagatggtgaatgtaatcaatacaatcattgatacgtatggaaaacctgatgaaatccgagtggaattggctcgtgaattaaagaagagtgccaaagaacgtgaggaactgacgaaagctatcgcaaagagtacccgtgagcatgaggagatccgtaaattgttgcaagatgaatttggtatgatgaacgtgagccgcaatgatattatccgttacaaactttatgaagagttgaaagataatggatataaaacattgtattccaatcaatatatacctaaagaaaagattttcagtaaggagatagatatagaacatattattccacaatcccgtctttttgatgattctttatctaacaagacattggagtataaggctattaatatagaaaagggaaataagaccgcttatgattttgtaaaagaaaaatatggagaagaaggcttgcaacaatatataaatcgttgcgaaagcttgttcaatgacaaaaaggcgaaacttcggaaattgaaaatggaacagaaggatataccggatggtttcattgatagggatttgagaaatacacaatatatagcgaaaaaagcactcgctatgttgaacgaaatctgccgtagagtagtggcaactaccggttccattacagatcaattgcgtgaagactggcaattggtggatgtaatgaaagaactgaacctgcctaaatatgaagccttgggttttgtggaaacatacgaagataaggacggaagaaaaatcaaaagaataaaggattggacaaaaaggaatgaccatcggcatcatgcgatggatgcgctgacggtagcttttacaaaggatgcgtttattcagtatttcaataataaaaatgcggcacaagattcaggcaatagaaaccatacgaatataataggtatcaagacccgttattttgacaaaggaagagctttgcctcctattccattggagcaattccggatagaagccaaacagcatttggaaaaactgctggtatctattaaagctaagaacaaggtggtgactgtcaatgttaatcgaacaaaaaagagaaagggtgaaaatacgaagatacagcaaactccgcgaggtcagttgcatttggaaacggtttatggtagtcacaaacaatatgtgacaaaaatagaaaaggtgaatgcttcttttgatgcggctaaaatagcgactgtgagtaaacgggcttatcgaaatgccttacttaaacggttggaaacattcggtaatgatccaaagaaagcatttacaggaaaaaatgcattggaaaagaatccgctttatgctgataagtatcagaccatacgagttccggagaaggtacaaacagttgaatttgaaactatttatactatccgaaaaccggtcgatcctgctttgaatgtggataaagtagttgatgtaaaggtacgtgctattttagaacggcgtttgaaagaatacggtggagatcccaaaaaggcatttgttaatttttgggaaaatccgatatggctgaataaggaaaaggggataagtatcaagcgggttagcatccgaggaatcaataatgcccaatcgatacacgtgaagaaagataagaatgggaatccgatatgggatgaaaatggaaaacaaatccctgtggattttgtaaataccggaaacaaccatcatgtggctatttatcgtaaacctgttttagacaagaaaggacaggtgacgtttgatgaggatggtaatctgatgtatgaactggacgaggtggttgtccccttctttgaggctgtaacacgggctaatttaggacttcctattattgataaggattacagaaaaagtgaaggttggcaatttttgtttagcatgaagcagaatgaatatttcgtgttcccgaatgaaaagacaggcttcaatccgaaggaggtggatttgttgaatccggataattatgcaatgattagtccgaatttatttagggtgcagactatgtcaaaagttatgtatggaaataatgttgttcgagattataaatttagacatcatttggaaacaacagtgaaagatatgaaagagttgaaagatattgcttataaacaatataaaacactttcttttggtaatagtgttgtcaagatccgaattaaccacattggacaaatagtatcagtgggagaatattaa

SEQ ID NO: 4 - DNA, 4293 bp, Capnocytophaga canis
  source 1..4293: mol_type = unassigned DNA
atgaaacatatactcggtcttgatttagggacaaattcaattggttgggcttatgtaaaagaagccgaaaacgatactgaaacttcggagattgttgatttgggagtgagagtaaatccgctaacaaccgatgaaaaaacaaatttcgagaaagggaagcccatttctaccaatgccgatagaaccctgaaacgaagtgctagacgcaacctgcaacgctataagctccgtagaaaagaactcatcgaacttttgaaagaacatcaactcatttctgaaaatacaattttaacagaaaacggtaaaggaaccaccttccaaacattagaattacgagcaaaatcggctaaagaaaaaatatctttgggggaattggctcgtgtttttttaacgattaataaaaaaagaggttataaaagcagtcgaaaggctaaaaatgaagacgaagggcaactgatagacggaatggaaattgccaaaagactttatgaagaaaaccttactacaggacaattatctctacaacttttaaaagaaggtaaaaaatcattgcctgactattatcgttctgatttacagtttgaattggataaagtttggaactttcaaaagcagtttcattcggatattttgaccgatgaattttacgctcaacttaaaggtaaaggacaaagggcaaccagtgctttgtttttggcaaaataccaaatctataccgctgaaaataaaggaagtagagaagataaaaaattacaagcctatcaatggcgagtagatgctctctcaaaggaattgacaagggaagaattggcttttgtcattaccgaaatcaataataatttaaataattccagtggttatttgggggcaatttcagaccgaagcaaggaactttacttcaataatgaaaccgtaggcgagtatctttggaaacaaattgcagcaaatccgcatacttcgttgaaaaatcaggtgttttatcgccaagattatttagatgaatttgaacgaatttggaatacccaagctcaattttatccacaaattttgaccgagtccttaaaaaaagaacttcgagatgtggtgattttctaccaaagaaaactgaaatcgcaaaaatcattggtgagtttctgtgaatttgaaaataaggaaatagagattaaaaaagaagatggtacgagtaccaaaaaagtaatcggtcttaaagtagctccaaaatcatcgcctctgtttcaagagtttaaaatttggcagaatttaaacaatgtcttgattcgtaaaaaaggaagtaaaacgaaaaaagtagctaaaactcaacaagcagttctttttgaagaagagaaaacaatttccgaattggatttggaggcaaaacaagcattatttaatgagttaaatctcaaaggaaatctcaaagcggattattgtttggaaattttagggtattctcccaaagaatgggagatgaattatcctgaattagagggtagtagaacaaataaagcattatacgaagcatatttgaaaattactgatttagagggatatgatgctaaaaattacctcaaagtaaaattgaataaagatgaggtggagcttgatgatttgaaagttcctgcatcggaaatcaaggatatggttcaagcgatttttaaagaggcaggtatcaacacggatattctgcatttcaatgctgaattagacggtaaagattttgaaaatcaagcaagttatcagctttggcatttgctgtattcttatgaaggcgatgattctaaaagtggtaacgaattgctttataaattgttagaaacaaaattcggttttaaaaaagagtatgctcaaattttagcgaatgtttcgttatcagatgattatggtagtctatcgaccaaagcgatgcggaaaattcatccatatattaaggaaaataaattcagtaccgcctgtgaattagcaggttaccgccattctaaacattcattgaccaaagaagaaaacgataatcgtgtactgagggatagtttggaagtcttgaaaaagaatagtttgcgtcaaccggtagtagaaaaaattttaaatcagatgattaacttggtcaatgcgcttttaaagaaataccgaaccgaaacccctaactttaaattcgatgaaattcgtatagaattggctcgtgaactgaaaaaaaatgcggaagaaagagccaatatgacggcaaacatcaataaagcaaaaaccgaacacgaaaaaatcattaaaattttgaagaatgagtttggtttaccaaatccaacaagaaatgatattatccgttatcgtttgtacgaggaattaaaagcgaacggatataaggatttatatactaatataaaaattccacaagaaaaattatttactaaagaaatagatattgagcatattataccaaaatcaagaatatttgatgatagtttttcaaacaaaacgctttctttcagaaaaaccaatttagataaaggagaacggacggcatttgattatatggaaagtaaatttggagcggataaattggaagaatatgtggctcgtgtggaagatttgtatcgaaataatattatctccaaagcgaagtaccaaaaattattgaaaaaagaaagtgaaatcggagatggttttgtggaaagagatttgcgtgaaacacaatacattgctaaaaaagccaaagaaatacttttgcaaattactcgaaatgtgctttctacatcgggaggtattacggatagattgagggaagattgggatttggtcaatgtaatgaaagaactcaacttgccgaaatacagagccttggggcttaccgaaatggaagatcgtaagtatggtcagcaagtggaagttatcattgattggacaaaacgaaatgaccatcgccatcacgcaatggatgctcttacggtggcttttaccaaacacaatcatattcaatatcttaattatctgaatgctcgtaaaaatgaaaaacataaggagcatagcaatattatgggtattcagcaattggaaaccataaaagtaaccgataaaaatggtaatgaaaaaagagtttttaaagcaccaatgcccaatttccgtcaggtagccaaagcctttttggaaaatgttttaatttctcataaggctaaaaataaggtagttaccaaaaacaagaataaagttgcgggaagtaacaaagttcaggaagttttaactcctcgtggacaattgcataaagaaacagtttatgggaaataccagtattatgtacaaaaagaggaaaaaattggagggaaatttgatttggaaaccatcaaaaaagtagccaatccactgtatcaatccttgttgaaaaaaagattagaagaaaatggcggcgatccgaaaaaggcttttacaggtaaaaattcattggccaaaaatcctatttatttagatgatgcccaaacagaacaactgcctgaaaaagtgaaattggtatggctagaaaatagtttttccatccgaaaagacattactcctgaaaactttaaagatgaaaagctaatcgacaaaatattagacgaaggggtaaagagaattttgaaagaacgactacaatcttttggaaacgatgctaaaaaagccttttcagatttagacaaaaatccgatatggctcaataaagagaaaggaattgcgataaagcgtgtaaccataagcggtgtagcaaatgccgagcctttgcataccaaaaaagaccatttaggcaaagaaattttggataaagaaggtaagcctattcctgtggattttatcagtacgggcagcaatcatcatgtagcggtttaccgtgatgagaagggaaatttacaagaaaaagtagtatcggtttttgaagctgtggtaagagccaatcaaggtttgccaataatagacaaaacatacaatcagcatttgggttgggaatttttgttcacaatgaaacagaatgaaatgtttgtcttcccgaatgaatcaacaggatttaatcctaacgatattgatttattagaccctaaaaacaagagaataataagcccgaatttatttagggtgcaaactatatctgttgtgaaatatggtaatgcgatagttcgtgattttaaattcagacatcatctagaaacgacagtagaagataaaaaagagttgcaaggaaaaacttaccaacaaattaaaagtttgtcacctttgaatgatatcataaaggttagaatcaatcatttaggagatattgttagtgtaggagaatattaa

SEQ ID NO: 5 - DNA, 4608 bp, Ornithobacterium rhinotracheale
  source 1..4608: mol_type = unassigned DNA
atgaacactattctaggattagaccttggaaccaacagtattggatgggctttaatcaaagttctaaatgacaaaactagattacctttagaaattatagatctcggtgttgttgtgatacctacagatcaaagaactttagacaaattttcaaaaggcgaatctatctctaaaacagctgaaagaacaaaacaaaaaggtgtaagaaagttatatgaaagaaaaaagctaagaagagaaagattgcatagggtattaaatattttaggttttttgcctgaacattattctaaaaaaattgatttcaaaaaacatttaggacaattttttggtaattctcaaccaaaaatttcatatgtagaaaatgaccacggaaaacatgaatttattttcatggatagttacagagaaatgttaaaagaattttcaaaacacaatattaaaaatgtaccatatgattggacgatttactacttacgaaagaaagccttatctcaaaaaatctcaaaagaagaacttgcttgggttattttaaatttcaataaaaaaagaggttattatcaatttagagatgataatgctgatgaaaacaaggaaaataaaattgagaaatactatgctctaaaggtcactaatgtaaaaaaagaagatgctcaaaattatactattactctagaaaatggatggatttataaaaataaaagcaaaatatctttattagattgggttggcagcacaaaagaatttatttcaacagaaaaatttgataataaaggaaatataattaagaagaaaaatggtgaagatgatagaactttaaaattagttgattcagaaaaagattggattgctattaaaaaaagtacggaagatagaattgaaaattacggaaagacagttggaacatatctttatgaacatttattaaaggatcctaaccaaaaattaaatggagaacttataaacattatagatagaaagttttacaaaaatgaactaaaacaaattttagagaaacaaaaggaattccaccctgagctactaaatgaagatttattccaaaaatccatcattgaattatatccaaaaaatagtacaagacaaaaagaacttaaaaataaagatttatgttatttactcattgatgatgtaatttactatcaaagagatcttaaaaagaaaaactccacaataaacaaatgtagctttgaaagtcgagaatattatttgaacggagaaaaacaaattcaaaaaataaattgcattgcaaagagcaaacctctatatcaagaattcagaacattacaatttatcaagaatttaaaagtttatgaaattattgatgggcttgagaaagatatcacaagtaagttattacctgattttgaaacaaaagaacatttttttgaatggttaaacgataaagagaaaatagatcaacttcaattattatcctacaaatgttttgacttgcatgacaatgttaaaaatgatctaatagcaaaaggtatcaaaaggcctacagaaaaagcaattagaactgaacttcttgaaaaatacagatggaattattcaaaagacaacgatagaaatttcttattaaatgagactcgttttaaaattttaaaatatctaaaaaaagttgacaaaaaactcacattaacgaatgaacaaattgaaagtctatggcttttgctctattctgcaaaagatgaaagagaattaaaaaatggtcttcaaaaattctcagaaaaaaataaattacctaaaaaattctcagatatctttatctcatttcctcctttcaaaaaggaatatggtgcgtattctgaaaaggcattgaaaaaattacttagtttagttcgatttgggaaatattggtcttttaacaaaattgacaataatattcaaaataagattatgaacatacttaacggagaagtggacgatagcatctctgacagagtacgagaaaaaacaatcttattacaagataaaaatgatttccaagatttaccattatggctagcttcatatgttgcttataatagattttctgaggtttcggaaattaaatattgggactctcccgataaaatagaatttttaaaacagcactctattggaaatccaatcgtagaaaaaataatcaacgaaacattgaagttaattaaagatatatgggtcatacacggaaaaagttgtaaaaatttcttctctgaaatacatattgaacttagtagggaaataaaatctagttcaaaaaaaagagctcaaataactaacaacaatacaaagaatcaaaaattaaacaatttaattaaatcactacttatagagatggccagcgatactaagtatgagaatgtaactccttattctccatctcaacaagaaattttaaaaatctatgacgaaggtatttactcaaaagaggaaaactctgaaaaaattaaggaaataaataaaattagaaacaacaataaaatatctaagtctgatattacaaaatacaaactctggctagaacaaggctatatatcaccttacacgggtaaaattattcccttaactaaacttttcactgcaaagtaccaaaaagaacacataatacctcaaactaaattctttgatgatagttttaataataaagtaatatgtgaagctgaagtaaacaaactaaaagacaactcactagctatgaatttcataaaagctaagggaggaaaagccgttaaactatctgatggagaaacggttacgatcctcaatcaagaggaatataaacaactcgtgaggacatctttcaaaaagaattctataaaattgagaaacttacttttggaagaaattccagacacattcactaaaagacaacttaatgacactaaatatatatcaaaacttgtattatcattgttatctaacattgttagagaaaaaggagagcttgaaagtaccgctaaaagaatagtaagtacaaatggccaaataacatctatacttagaaacgattgggggctaaacaatatctggaacaaattgataactccaagatttgaaaggttaaacaatattaataaaaataaaatttatggtaattgggaaaacaaaaaaggaaaaaatgtatttcaaataaattacttaaacgacaatttatcaactctaaacaccaaaagaattgatcatagacatcatgccttggatgcacttattgtagcatgtaccacgagaaatcatataaactttttaaataatcaatatgcaaaaagtagaaatcaacgacatgatttacgcgctaaattaaaaagaagagaaactattacaactgagggaagtaaaaaacaggtttttaaagattttataaaaccatgggaatcatttacccaagatgcacttaaaaagcttgaaacgacaattgtaaactttaaagtaaataaacgaattataaataaaacaattaattggtacaaaaaatgggaaaaacaaaaagatggtacttacaaaaagattcaaaaaaagcaaacaaagggagatgcatgggctattagaaagccattacatatcgatacaatctatggcattgtatgcaaaaaattgcctttaaaatctgctttagaaaattacaaaaatattattgacgaaaatttaaaacataaaattaaagaacttaaagaagtaaataaattcgacaataaccaaattataaattttttcaaagagtgtaattttatttttgaggacaataacattcaaaaagttgaagtttacgattttaaagataatagagacaaaactattttatcatcatctagacaattgatcgacgaaagctttacacctaaaaaaataggaaaagttttagatccaactatcaggaatattttattaaaacatttaaatagcaccaaatacaataataaatttgattcagatggcaacccaatcaaaccagaaaaacttgctttttcacctgaaggcttaaaagatttaaacaaaaacattaaacacttaaataataacaaagaacaccaaccaatcaaaagagtaaaattatttgaaacattgggaaataaaattaaggttggctacactcaacaaaaaaacaaaaaatttgcagagaccgcaacaggaacaaatctttttttaggaatttattctgacaacaacaaaagagattttaaaacaatacctttaattctagctatacaaagagaaaaagaaggattaaatccatgtccagatacagatgaaaagggaaatcaacttttattttcattatctccaaacgaacttgtttttgttccaaataatgaagaaagaaaaaatccgaatttagttgattttgaaaatctgagtaaggatcagattgatcgaatatacaaatttgtaagctgtactggtagtgaagcttattttgttccttcaagaactgcaaaaccaattattgaaaacgaaaatggaacaaataataaatcccaaagaattatagaatttaacgaaaagacatctataaaaaatgaaaaaaacgagccagttttaatcaaaactatttgttggaaaatagaagtaaatcgtttaggaaaaattattaaagttattaaataa

SEQ ID NO: 6 - DNA, 4323 bp, Weeksella virosa
  source 1..4323: mol_type = unassigned DNA
atgaaaaccatattaggactagatttaggcaccaactctattggatgggcgttggttgaacaagacttcgaaaataaacaaggactgattttgggaatgggtagtcggattattcctatggatgcaggtataatagggaagtttgcagaaggaagttccatctctcaaacggctgaaagaacaggctatcgtagtatcaggagattgagagaaaggcatttacttcgtagagaacgattacaccgagtactcaatattctgaagtttttacccgaacattatgctgctgaaattgactttgagaaacgatttgggcagtttttagcggaaactgaacctaaattggcttggaaaaagaatgctgaaggtaagtttgagtttttattccaacgttcttttgatgaaatggtagctgattttaaagccaatggacaggatattaaaattccttatgattggacaatttattatctccggaaaaaagcgttgactcaaaaaatttctcctcaagaactggcctggattattcttaactttaatcagaaaagagggtattaccagttaagaggagaagaagaggaagaaaatcctaacaaaaaggtcgaattctactcgttgaaaattgtggatgttgtagcagacgaacaacccaataaaaaaggtgatacctggtattctttacaccttgaaaacggttgggtttatagacgttcgagcaaaatccctctttatgattggaaagataaggtgagagattttatcgtaactaccgatattaacgaagatggctcagaaaagttggataaagacggagaggtaaaaagaagttttcgtgctccaaaggaagacgattggactttgataaagaagaaaactgaacaagaaattgaacaattcaatcagaccgtaggtagctatatctatgaagccttattagataaccctactcaaaaaataagaggaaagttagttcgtaccattgaaagaaagttttataaatcagagttaaagaaaattttagaaaaacaaatagaactacaaccagaactgtttacggaagatttatataatgcgtgtgcacgtgagttatatcgcagaaatgtagcgcaccaacagcagttaagtagtcgagatttcgtgtatctttttctaaacgatattattttctaccaacgtccgctaagaagtcagaaatcattgatttccaattgttctttagaatttcgaacaataaaagataaagacggtaatggccaaattatttatctaaaggcaattccaaaatccaacccatattatcaagagtttagagtttggcaatggttgtataatttgaaaatttttaccaaagaggacgataaagatgttacgaatcaatttataaataaagtcgaagatttagaggctctttttgagtttctgatgaaccaaaaagaagtcaatcacaccgatattctaacttatctcatcgaaccaattgtaaaatcgaagtatccaaatgcaaagggtaaagcatttaaagatgaactaaaaaaagaattaaagaaataccgttggaattatgtttatgatgctgataaagatgagtcgaagtcttacccgatgaatgaaaccaggtatgaactcagaaaaagattggataaagtagagaatgttcctgctgattttatgacaagaaaaattgaacaacatttatggcacattatttattcggttaccgataaaatcgagtttgaaaaagcactaaaatcttttgcaaataaatatgatttacatcaggagtctttcgtagaaaacttcaagcgtttcaaaccttttgatagtgattatggaacttattctgaaaaagctatcaaaaaactattgcctttgatgagagttggaaagtactggagttgggatatcattgatgacaaaacgaaaaccagaattggtaaaattattacaggagaatatgatgaaacaataaaaaatagagttcgagaaaaagcgattgatttaactgaagaaaatcattttcaaggtttgcaattgtggttggcacaatacattgtttacgaccgacattccgaagctgacatcgctggaaaatggaattcagttgccgatttagaacaatatttgtctgaatttaaacaacattctttgcggaatcctattgtggaacaggtcattaccgaaacacttcgagtagtaagggatatttggaaacaatatggaaaaggcgctaaagattatttcgatgaaattcatatcgaattgggacgtgaaatgaaaaatacggcagaggaacgcaaacgcttatccagcattatttcagaaaacgaaacgaccaatctccgcatcagagctatactcgaagaattgatgtatgatgaaaatatggaaaacgtgcgcccttattcgccaatgcaacaagaagccttaaaaatctatgaagatggtgtactaagttcaagtgtagaaatcccagaggatatcgaaaaaatcagtaagaaatccgagccaacaaagtcagaaattcaacgatacaaattgtggttagaacaaaaatatcgttccccttatacaggaagaccgattccattgagtaagttgtttacacctgcttatcaaatagagcacattatcccacaggcaaggttttttgatgatggcttttccaataaagtgatttgtgaatctgaagtcaacgcactaaaggataagatgctgggactagagtttattcaaaattattatggccaaaaagtcactaccagttttggagaagtgacaatacttacagaagatgcctacaaagcatttgtgaaagaacactacgacaagaaccgaagcaaacgcaacaaacttttgttggaagaaattccagaaaaaatgatagatcgacaaatgaatgacacaaggtatatcagtaaatatatctccaaagtattgtcaaatcttgttagaggtgaaaaggacgatgaaggagtaaattctaaaaacatcattcctggtaatggaaaaataactggaatattaaaacaagattgggggttaaatgatgtttggaatgacttaatattacctcgatttgagcggatgaatcaattaaccaactccactgattttacagcttggaacgaaaaacatcaaaaatttttaccatcagttccactagagctatcaaaaggttttcaaaagaaacggattgatcacagacatcacgctttagacgcgttaattatcgcttgtgctacacgcgatcacgtcaatttgttgaataataaacacgctaaatcaagaaacgagcgctacgatctacaacataagctgcgccacaccacgccttggcaagacaaggaaggaaaggttagaactaaattcacagagtttaaaaaaccatgggaaacctttactcaggacacaaaaaaagaattggaaaaaattgtcgtaaactttaaacagaacttacgtgttatcaacaaagcaaccaattattatgaaaagattgttgacggtaaaaaagtaatgttcaaacaagaaggggtgaattgggcaattcgtaaaccaatgcataaagaaacggtttcaggaaaaattgatttacccagagtaaaggtgtccaaaggcaaaatattgactgcgaccagaaaatcactggatacatcttttaatgctaaaacaattttatccattaccgatacgggaattcagaaaattttgttgaattatttaaaagcaaaaggaaatcctgaattggcgttttctccagagggtattgaagagatgaatcaaaacatttcattatataatgatgggaaaccacatcaacctattttaaaagttcgtgtattcgaacagggaagtaaattcccattgggagaaacgggtaacaaaaccacaaaatatgtggaagctgccaaaggaactaatctcttttttggagtatatgaagataatcaaggaaaaagaagttatgataccattcctttgaatattgttatagaacgacaaaaacaaggcttaaattctgtgccagaaacgaatgaaaaaggtcatcgcttattgtttagtttgtcgccaaacgatttggtttatgtgccgatcgaaggagaggtttttgatgaaactaatcctgatgtaaatagaatttataaagtagtgagcttcagtggaagtcaaatgttttgtgtaaggcaagatgtagctacatcgattgtatataaactagaattttcctctctaaacaaaatggaaagaactatagatggtataatgataaaagaaatttgtatcaaactcaaagtcgaccgtttaggtaacatttcaaaagcttaa

SEQ ID NO: 7 - DNA, 4038 bp, Flavobacterium frigidarium
  source 1..4038: mol_type = unassigned DNA
atgaagaaaatattaggattggatttggggacaacctcaataggatggtcgtttataaatgaatcagaaaatgaaaatgaaacttcatcaatagtaaatacaggagttcgtattgtgccattaacttcagacgaagaagctgacttcaaaaaaggcaatacaatttctataaacgctgatagaacattaaagcgtggtgcgagaagaggattgcaacgttttaaattgagaagagatgcattattagatattttttctaaaataaatttcattcccactcattatgtttatgctgaaaatggttcgaacagtacttttttatcgtatcaattacgtgcaaaagcagctattgaaaaagtaagcaaagaagaattagtacaagttttattaatgctcaacaaaaaaagaggatataaaagtagtcgtaaagcaaaatctgcggatgaaggcgatgcgattgatggaatgaaaattgccaaagaaatctttgaaaacaatttaactcctggtcaatgggtttataactcactattaaaagagggaaaattcatccctgatttttatcgttctgatttacagaaagaattagagagaattgtacgttttcaaaatcaatttcattcggaacaaatgaatgaaaaattgttggaagatattcaaggaaaaacaagaacccaaacttcgcaatactttaccaacgcaataaaaattccacttaccgaaaataaaggttcgagagacgaggtaaaactacagcattacaaatggaggtctgaagcattgactagcgaactggatttaaaaatcctagcatacgttattactgaaattaacaatcaaattaatcagtcgagtggttatttgggagctattagtgaccgaagcaaggaactgtattttaatcaagaaactgttggacaataccaatacaaacaactacaagaaaatgcacataataaactaaaaaaccaagtattttatagacaagattatttagatgaatttgagaaaatttggaaaacccaagcaagatttcatcctgaattaaccgataaactaaaaacagaagtatgtgatattacgattttttatcaaagaaaattaaaatctcagaagcatcttgttagcttttgcgagtttgaaaaaggccacaaagccattccaaaatcatctcctctatttcaagattttagaatttggcagaatttgaataacattgttatcaaaaacgaaacaaccaaagaaccatttgttttagacgaagatttaaaaaaaatcatttcagaagaattactttttaaagaaagcatgaccgatgtgcaaatgatggccttttgcgatttaaaaaaaggaaaccattctgccaatttcaaaaaaatagaagggaatagaaccaatacagagatttttaaagcttttgagaaaattttaattctcgaaggctacgacgaattggatttttctaaactagatgcatcagatatcaaacaaatttttaaatctgcttttgttgatttaggaatcagtacagctatacttcattttgacccaaaaattcaaggaaatgattttgataaacaaggatattaccaattctggcacttgctatatgcagcagaagatgacgataaattgaaagaaacgttaaaaaataaatatggatttaaagaaaaccaccttccttatctattgaatattaatctacaagctgattatggtagtttgagtgccaaagctattaaaaaaatattgcctcacttaatggatggacatatttataataaggcttgtttaatgagcggttacaatcactcctcctcgctaactaccgaacaaaataatgatcgtgttttaaaagacacacttgaattattaaaaaagaacagcttacgtaatccagtagttgagaaaatactcaaccaaatgattaatgtaatcaatgctattataaaagaccccgaaatggggaaaccagatgaaatcagagtagaactggctcgagagttaaaagcaaacaacgagcaaagaagtgatatgacaaaggctatcaataaaagtacagccgaacacgacaaaattagacaactactccgtaccgaatttggaattcctagagtaactagaaacgatattataagatacaaactgtggaaagaaacagaaggaatttcgatatatacaggcaaaaccattgaagcttcgagattgtttaccaaagactatgatattgaacatattataccaaaatcacgattatttgatgatagcttttcgaataaaaccatttgtgaacgccagctaaatattgataaaagtaataaaactgcttattcttttttacaagaaaaattatctgctgaagattttgaccaatttgaaaaaagagtaaaaagtttgtttggtaaaataagtcgcaccaagcaaaacaaacttttgatggcagacaatgaaattccagaaggttttattgaccgtcagttacgagaaacacaatatattgcaaaaaaggctaaagaaatattattcgaagtttctagaaatgtaaccgcaactattggtagtgtaaccgacaaattgcgtgatgattgggaattagtagaagttatgaaagagcttaattggaagaaatacgaaaaattgggtctaacctatgaagaaaaaggcaaaaatggagaacgcctatacaaaataaaagactggactaaaagaaacgaccaccgccatcatgcgatggatgcgattacagttgcgtttacaaaacctgcttatataaagtatttgaatacattaaatgcgcaaagtaaagatgatactaaagaaatatattcgcagtatttaaaaagagacaaaaataataagttgcgtttcatccctccgatggagaattttagagaagcggctaaaaagcaacttgaaagtattttgatttcgtacaaagccaaaaacaaagtagttaccaaaaataaaaatacaaccaaaaaaagcggaggaacgcaaacaaaaatacaattgacaccaagaggtcaattgcataaagaaacggtatatggtaaactacagcgttatgaaaccaaagaagagaaagtaaacgccaactttacagcggctcatattgcaaaagtggccaataaagcctaccgtgaagcactcttaaaacgactggaagagaatgaaaatgatcccaagaaagctttcacaggtaaaaattcattggcaaaaacacctatctatattagtttaaaagataacattactgttcccgagaaagttaaattagtctggttagaagacaattacacgattagaaaagacattacacccgataattttaaggatttaaaaagtattgctaaagtaatggactctggattaaaaactattttagaaaaccgtttagccgagtatggcaatgatcctaaaaaagctttctcaaatcttgacgaaaaccctatttggcaaaacaaagaaaaaggaattgcgataaaacgggttactattagtggcgtgagcaatgctcaggctttgcataccaaaaaagaccatttgggtaatgaaattttggatcaagaaggaaaaccgatgcctgttgattttgttagtactggaaacaatcatcatgtggccatttacagagacgaaaaaggaaatctacaggaagaagtagtttcgttttatgatgcagttatcaggcgtaatctagggttatcggtaattaataaaaaccatgaaaaaggttgggactttctattctccatgaaacaaaatgagttttttatatttccatctgatagctttaatcctcatgaaatggatttacaaaacccaactaattatcatttgattagtcgttatatattccgtgtacaaaagattgccacaaaagattacacatttagacatcatttagaaacaactgtagaagacaaaaaagaactaaaagatatttcatctaaacgattaggattaaacggaataaatgacattgtaaaaatccgaattaaccatttggggaaaattgttcagataggagaatattaa

SEQ ID NO: 8 - DNA, 3642 bp, Rikenella sp.
  source 1..3642: mol_type = unassigned DNA
atggagaaaagattgggtatagatgtaggaaccaattccctcggatgggctatcgtggaggtggacgacgaaggatgtacgctgctcgaccgaggggtggatatctttcaggagggggtagcacgtgagaagaatcaggagaaaccggccgtgcaggacaggaccgatgcccgtgccctacggcggcactatttccgtcgccgtttgcgcaagatagccctgttgcgggtgttggtacggcacgacctgtgtcccgcattgtcggaggagcagttgaacgcctggcaggggaaggggatttatccgttggacgatgcgttcatccgttggcagcgtaccgacgacaatgcggacaggaacccgtaccgcgaccgcttccggtgtctgaccgaagaactcgatttggcctgccgcgaagaacgttacgtgctgggcagggcgctgtatcatctgtgtcagcgccgcggatttctgagcaatcgcaaggatgcgggaaacgaggccgaggagggtaaggtgaagcaggagattaaaaccctctctgccgacatggccgctgcggggtgcgaatatctgggcgaatatttctaccggctttaccagcggaaagagaagattcgcaaacactatacagcccggaacgagcactatctggccgagtttcgtgccatttgccggaaacagcggcttgatgaggagttgcgacaggcattggaaaaagccattttctatcagaggcccctcaagtcgcaaaagggcttggtaggcaagtgtactttcgaaaaggacaagagccgctgtccggtgtcccatccgcgcttcgaggagttccggatgctccagttcatcaacaacgttcgggttacgggtcccggcgatgcggagccgcggcccctttcgccggaggaggtggagattgtccgtccgctgttcctgcgcaagagcaaaccgcatttcgatttcgaagacattgccaaaaagatagcgggcaaagggaactatgcctgccggggcgagttgctgcaggcgccgtaccgcttcaattgtgccggcaaatcgacggtgacggggtctcccgtatcggcccttttcgcttcggttttcggagatgattggcagcgtgagatttgcagcctgtatacgctcggtgccgggaaaaacgaggagcagatactcaacgacgtatggcatgtcctcttcgcctttgaggacgaggagcggttgcaggcctggttgcaggagaaactgcagctttcggccgacgatgcgaaaaccctggcggccttccgtctgccgcaggggtatgcgtcgctgagcctgaacgttatcaacaagatacttccctacctgcggcgcggataccgctacgacgaggcggtattctttgccaacctcggaaaggtgcttccggcggaggtgtatgccgacccggccaggcgccgcgaagtggagcaagggatttccgcccagatggatgatttgggcgacggagagaaaacacggaaggaggaacgtattcgcgattatctgcggcgttattggggcgtagaggagaagcggctggagcgcctttaccatccttcgatgattgaggcgtatccgtcggcgtctcccaacggacagggtctcctgcagctgggttcgccgcgcatcccggctgtccggaatccgatggccatgcgagctctgttccgcctccgcgtactgctgaacgaactcctgcgcgaaggaaagattgaccgtggcacgaaaatcaatatcgagctcgcccgcgagctgaacgacgccaacaaacggaaggccatcgaacgttaccagcgggagcgggaggctgagaaccgcaaatatgccgaagagattcgccaacagtatgtcgaagcgacgggacattccatagagccctccgaagaggatattctcaaataccgtctgtgggtggagcaggggcattgttccctttatacggggaagacaatcgggatttccgagtttctcggcgacggccggcggtacgacatcgagcataccgtcccccgttcgcgtgggggagaggatgcgcagtacaacaagacgctgtgcgaagaggaattcaaccgggatataaaacgcgacaaactgccgtcggagctggccaaccataccgcgatattggcctgtgtcgagtcgtgcggatggttcgagcgcatcgaggggttggagcatcgggtctggggggcggaccgtcgcgcaaagagtgcgacgaccaaatcggcgaaggatttcgccattcaggaccggcactactggaggatgcacctcgattactggcgcaggaagtgcgaggcctttaccatgacggaggtgcccgaaggattcagcaatcggcagggtgtggatgttggcatcatcggccggtatgcgcggctctatctgcagacagtcttcgaccgggtttatacggtcaagggtgctacgacggctgcgttccgcaggatgtgggggctgcaggaggagtatgcggcgaaagagcgcgtgaatcatgtccaccactgtatagatgccattaccatcgcctgcatcggaagccgggagtacgccttgtgggcgcagtacgttcggcaggatgaactctatcggtggggggaagcggataaaccccgttgcggcaagccgtggccgaccttcaccgaggatgtccgggcgacggccgatgagctgctcatttcgcatcacacacccgacaacatgcccaagcagagtcggaaacggctgcgtgtgcggggaaaggtgcagcggaacgacaggggagaggtcaaatacatgcagggcgatactgcccggggtgctctccatcaacagacattttatggagccatcgaacgagacggcgagattcggtatgtcgtgcgcaagtcgctcgaccaactgctgcctgcggatgtggaaaaaatcgtggatgaggcggtcagacagaaagtcagggaggcggtcgaggcatacggtttcaaagaggcgacagacccgacgaaacacaccgtctggatgaacgaggaaaaacagataccgattcggaaggtgcggatattgaccggtgtgaaaaatccgattctcctgaagcctcatcgcgatgtatccgttaaggagtataagcgatattaccatgtcgtcaacgacgggaattactgcatggcgatttacgaaggcagagacaggcagggcaggttgaaacggacgtttgaaatcgtcaataaactggaggcggcccgttatttcaaacggagtgcggaccgggaatcccggcccgatttggtaccgctgtcggatgtcaacggttattcgcttaagtatctcttgaaaacggggacgatggtgttgttttatgaaaattccccggacgagttgtatgaatgttcggtcggagagttggctaaaaggttgtacaaggttgtgggaatggcgcaggatggtcgtgtccagtttctgtttcatcaggaggcacgggaccagaaagccgttacggcggagtgtggaatgggaatttcggttttcgatgcacgccatcctgctccgaagttgaggataagagtttccaattttaaaatgttcgtcgaaggctatgacttcgaactgacggttacgggggaagtaaaattcaaacggtaa

SEQ ID NO: 9 - DNA, 4380 bp, Jejuia pallidilutea
  source 1..4380: mol_type = unassigned DNA
atgtcaaaacttggattagatttaggaagctcatcggttggttgggcaaaaaatgtaggtggtaaaattgtaaaaagcggtgtaattacttttaatacaggaatgtcaaaagggcaatcaggtgggtatgtttctccaactagagaaagaagagaagcacgtgctaagcgaaacttgattaagtcaaggaaataccgaaaatgggaattattgaaagttttggcagaaatgaaatttgttccattggatgagcaagagctacaaatttggagcaaatacaaaaaaggcagcacacgtaggtttcctgaaaatgaaaaattcttaaagtggttggcttgtgactttacgtatgaagaaggtgaaaactataaaaacccatatgtattacgagtgaaagcacttaaccatattgtaactaagcatgaatttgggcgtgcattataccatattgtacaacgtagaggctataaagatattggagaaaccgataaggaaactgaaaaccaaattaaaagaaggaatgacgatggttttaaaaaagctttagatatacacggtactgtcgctaaagcattaaatgaagaatttcttaaaaagggaaaaagagcaagaaaccagtatcctcttagggaggaatataaacacgaattggaggaactatgtaaagctcaaggatataatatacaaaaagaagggaaagaaggttataaaaataaatttgtaaaaagtttatggaaagccattatttggcagcaaccactgaaaactcaaagaggcaatattggcaaatgttccttagaacctacaaaaccaagaagtccgatttcacatcctatttttgaaatatttagatcttggcaatttattaacactattagatattatgatgatgatggagaaaaacaagttttatcccaaaaaataaaacaagccctattttacgagaaattcttaaaaaaagattcaaatttcaaatttgaagaaatcagaaaatttcttgacaagagatttcaaaaagcaaagagatacaattacccaatagacagaaaaacaggaaaatatgatacttctgtttcgggaatgcctgtttgcaaagggcttataaatgtctttggtgaaaaagcacaatctgcacttgacgatatggaattgtatcaaatcaataacgcacctaaaattattgataaatattcaatatatgatttatggcatatcatattcgagtttgatgcagaacatcttgataagtttgcaaccgaaaagctcaaaattcagaataaaatagtaacaaggaaaaagaaacaaatttcaatttccccattggtagaattaaaagagaagtttattcagggttacgcagatttaagtttaaaagctctatgtaaaattataccatttttaaagaagggtcacttatataatgatgctgttattcttgctaaaataccagaattgctagatacacaatggcaagaaaaaagagatttgataaatgaagtattagagaaaagtaacaaactatacaatgaaagaaaagcaataatcaatattgcaaataatttgattgataagcataaggggttaaatcactctgaaaaatttgcatacaaagattttgaatatgctcttgtacccgacgatattgaggaaatcgaaaaagcttgtgtagggtattttggagaaaaatcttggataaagaataaaaaaaaggaagaaatcataaaagaagttggatttgaatatcaagactacttccacgacacgaaaagagcttatcgtaaatttccaaattttacagaaattttcaaagatgacttaaaagaaaatggtattaatttgaaaggcgaattatatcatcattccaatcgcaaaaatatatatgataatacactagaaataaatcatgaaacaggagaaaaatacttgccaacttataaggatactggaatagaaatattacctgttccatatatagatagtataaaaaaccctatgttcaataaatcgatgagcatattacgaaaattgattaatgagttgattgtagctggtgaagttgatgataacacagagattattgtagaacttgcacgggagctaaatgacaacaataaacgtgcagcaattgaacgctatcaaaatctacgaaaaaataaccgagaaaagtaccgggagtttttaaaagaatttaaaaatagagaaaacatcaatctaaatgttgaagaaagtatttcggcttttgaactatggtcagagcaaacgtttgaagaaactaatgatgaaaatggaaaaaggatatcaaacaaaggccatattgaaatattaaatgaaaaagcagctctaaaacgatacgaattatggatggagcaaaaaggtcaatgtatgtacacagggaaaatgatttcaattacacaattgttttcaaatgatatagatattatgcacactattccacgttggttgttgccagataacacaatggcaaatatgacagtaggattttctaaatataatcgtgatttgcaaaaagaaaagttgcctaagcaatgtgataactattctgtagatgtagatgggtggggaacaagtattgaacctaggttggaaatatggaagaaagagcgagataaatggaaaagtttatttgaaagtagaagaaaaccaaaaggtaatgaagatgaagagaagaaaaacaaacgaattcaggaaaagcactattttaaaatgcaccttatttattggaatgataagattgagcgttttgaagcagatgaggtaaaagatagttgggcaagaaggcaattagtcgatactcaaatgatcagcaggtacgcacgtgaatatcttaaattatattttaaaaaagtctccgtacaaaaaggtacagtcacatccgattttagaaagttgttcggatttcaagaagaggatgaaataaaaagtcgtgataaacacacacatcacgctattgatgcatcagttttaaccttgattcccgttaacagtagtaagagagaacaaattttaaaaaattattttaaaagtcaggaggacaaagataaattgagccttaaaaaactcagagccagtgtaaagccatcttctgattttaatcctcaagaattgataagaaaaatagaagaaaaaacactaattgttaattaccaaaaagacaaaattataaaccaatctataaaaaaagtaagaaaaagaggaaaaattcaatatgtcaaagataaacaaggagaatttgtattggacaaagagggtaacagaatcattaaatatgctaaaggtgatactcttaggagtgaattgtttgcacaaacctatttaggtaaaataaaagatgttgaaagatatgatgatagtagcccaaaacgaaataccgaaaatactgattggatatataaaaaagggaaagatgaatttatttttgtcaaaagagaaaatatagataaggtaaaatcatcagataaattgattaaatcaataatagaccctgttattagaaatttagtagaagaacagaaaaaaaacactattgtaaaagattatcaaggtaacgtaattcgtcatattagaattagaacaaaatcaggtagggaggtgaaagaacgaataaattaccgttcacgatacgactacaaaaataaattttactctgaagctggaaaaataccatatgccgtattacttcaaaaaagcataaatggagaaatagaaagagaaatgattccagtagcttcttttgaagtagctaaagtatttaaaaaacatagaaagtttaatccagaactttacatgaatgagtttcatccagatattggaaattgggataaaaaaaattggcttaaagttggacaaaaagtaattgttttaaagaatgataaagaatttgaaaaaagggatgacattgattttcaacataagagaatgtatgtaataacacagttttcagatggaggaatttggctacaataccatttaaatgcacaatccaaggatgatgtaaaaaaatctataagccttgcaaaagataagttgcttcgtaagtatgaaattcaatataatattcctgaggtaattgaagatgaatccattcaggacagaaaaaatcgtactgctgattataataataggaggtttagatttgatacaattagtaaaagttttaggctaacaacattaatggaaacgattggagaaaaaagaacaaaaaaaataaaagcagaattagacaaatataaagcgattccatctagtattgagattgaaggtgaaacggctttattgaaaatgtcaaaagaaaactggaattacctttatgagggtacagactttgaagttacaattttaggtaaattaaattggttgtga

SEQ ID NO: 10 - DNA, 4329 bp, Caenispirillum salinarum
  source 1..4329: mol_type = unassigned DNA
atgcccgtcctgtcaccgctctccccgaacgcggcacaaggccggcgccgctggtcgctcgcgctggatatcggcgagggcagcatcggctgggcggtggcggaggtggacgccgagggccgggtcctccagctgaccggcaccggcgtcactctgttccccagcgcctggagcaacgagaacgggacctacgtcgcccacggcgccgccgaccgcgccgtgcgggggcaacaacagcgccacgacagccggcgccggcgcctggccgggctcgccaggctatgcgcgccggtgctggagcgctcgccggaagacctcaaggacctgacgcgcacgcccccgaaggcagacccgcgcgccattttcttccttcgcgccgatgccgcccgccggccgctggacgggccggagttgttccgcgttctgcaccacatggcggcccatcgcggcatccggctggcggagcttcaggaggtcgacccgccccctgaatcggatgccgacgacgccgcgcccgccgccaccgaggacgaggacggcacccgccgcgccgccgccgacgaacgcgccttccgccgcctgatggccgagcatatgcaccgccacggcacgcagcccacctgcggcgagatcatggccgggcgcctgcgcgaaacgcccgccggcgcccaacccgtcacccgcgcccgcgacggcctgcgcgtcggcggtggtgtcgccgtgcccacccgcgcgctgatcgagcaggagttcgacgccatccgcgccatccaggcgccccggcacccggacctgccgtgggacagcctgcgccggctggtgctggatcaggcgcccatcgccgtgccgccggccacgccctgcctgttcctggaggaactgcgccggcgcggcgagaccttccagggccgcaccatcacgcgcgaggccatcgaccgcggcctgaccgtggacccgctgatccaggccctgcgcattcgcgaaaccgtcggcaacctgcgcctgcacgagcgcatcaccgagcccgacgggcgccagcggtacgttccccgcgccatgcccgagttgggcctgagccacggggaactcaccgcgcccgagcgcgatacccttgtacgcgccctgatgcacgaccccgacggactggccgcgaaggacgggcgcatcccctacacccgcctgcgcaagctgatcggctacgacaactcgccggtctgcttcgcccaggagcgggatacctccggcggcggcattaccgtcaatcccaccgacccgctgatggcccggtggatcgacggctgggtcgatctgccgctgaaggcgcggtcgctctatgtgcgcgacgtggtggcgcgcggcgcggactccgccgccctcgcccgcctgctggccgaaggggctcacggcgtgccgccggtcgccgccgcggcggtgcccgccgccaccgccgcgatcctggaaagcgacatcatgcagccgggccgctacagcgtctgcccgtgggcggcggaggcgatcctggacgcctgggccaacgcgccgaccgaaggcttctacgacgtgacgcgcggcctgttcggcttcgcacccggcgaaatcgtgctggaggacctgcgccgcgcccggggcgcgctgctcgcccacctgccgcgcaccatggccgccgccagaacgccgaaccgcgccgcccagcagcgcggccccctgcccgcctatgaaagcgtcatcccgtcgcagctgatcaccagcctgcggcgcgcgcacaagggccgcgccgccgactggagcgccgccgaccccgaggagcgcaaccccttcctgcggacgtggacgggcaacgccgccaccgaccacatcctcaaccaggtgcgcaagacggccaacgaggtcatcaccaagtacggcaaccgccgcggctgggacccgctgcccagccgcatcaccgtggaactggcgcgcgaggccaagcacggcgtcatccgccgcaacgagatcgccaaggagaaccgcgagaacgaaggccgccggaagaaggagtccgccgcgctggataccttctgccaggacaacaccgtgtcgtggcaggcagggggcctgcccaaggagcgcgcggccctgcgcctgcgcctggcgcaacggcaggaattcttctgcccctactgcgcggagcggccgaagctccgcgccaccgacctgttctcccccgccgagaccgagatcgaccacgtcatcgagcggcgcatgggcggcgacgggccggacaacctggtgctcgcccacaaggactgcaacaacgccaagggcaagaagacgccgcacgagcacgccggcgacctgctcgacagcccggcgctcgccgccctgtggcaaggctggcggaaggagaacgccgaccgcctgaagggcaagggccacaaggcgcgcaccccgcgcgaggacaaggatttcatggaccgcgtcggctggcgcttcgaggaggacgcccgcgccaaggccgaggaaaaccaggagcgccggggccgccggatgctccacgacaccgcccgcgccacccgtctggcccgcctctacctggccgcggccgtcatgcccgaggacccggccgagatcggcgccccgcccgtggaaacaccgcccagccccgaggacccgacgggctacaccgccatctaccggaccatcagccgcgtgcagcccgtcaacgggtcggtcacccacatgctgcgccagcgccttctccagcgcgacaagaaccgcgactatcagacccaccacgcggaagacgcctgccttctgctgctggcggggccggcggtcgtccaggccttcaacaccgaggcagcgcaacacggcgccgacgcccccgacgaccgtccggtggacctcatgcccaccagcgacgcctaccatcagcaacgccgggcccgcgccctgggccgggtgccgctggccaccgtggatgcggcgctggccgacatcgtcatgcccgaaagcgaccgccaggaccccgagaccggccgggtccactggcgcctgacccgcgccgggcgcggcctgaagcgccgcatcgacgacctgacgcggaactgcgtcatcctttcccgcccgcgcaggcccagcgagaccggcacgccaggcgcgctgcacaacgccacccattacggccggcgcgagatcaccgtcgacggccggaccgacacggtggtcacccagcgcatgaacgcgcgcgacctggtggccctgctggacaacgcgaagatcgttccggccgcccgcctggacgccgccgcgccgggcgacaccatcctcaaggaaatctgcaccgagattgccgaccgccacgatcgcgtcgtcgaccccgagggcacccatgcgcggcgatggatttccgcgcggctggccgccctggtgcccgcccacgcggaggcggtggcgcgcgacatcgccgagcttgcggacctggacgccctggccgacgccgaccgcacgccggagcaggaagcccgccggagcgcactgcggcagtcgccctatctcggccgcgccatcagcgccaagaaggcagacggccgcgcccgcgcccgcgaacaggagattctcacgcgcgcgctgctagacccgcactggggcccgcgcggcctgcgccacctgatcatgcgggaggcgcgcgcgcccagcctcgtgcgcatccgcgccaacaagaccgacgccttcggccgcccggtgcccgacgcggcggtgtgggtgaagaccgacggcaacgccgtctcgcagttgtggcgcctcacctcggttgtcaccgacgacggccggcgtattccgctgcccaagcccatcgaaaagcgcatcgagatcagcaacctcgaatacgcccggctcaatggcctggacgagggcgcgggcgtcacgggtaacaacgccccgccgcgtcccctgcgccaggacatcgaccgcctgaccccgctgtggcgcgaccacggcaccgcccccggcggctacttgggcacggcagtgggagaactggaagacaaggctcgctcggcccttcgtggcaaagccatgcgccagacgctgaccgacgctggcatcacggccgaagcggggtggcggctggacagcgagggggcggtgtgtgacctagaggtcgcgaagggggacacggtgaaaaaggacggcaagacctacaaggtcggcgtcatcacgcaaggcattttcggcatgcccgtcgatgcggcgggaagcgcacccaggacgcctgaagactgcgagaagtttgaagagcagtatgggatcaagccgtggaaggcgaaggggattccattggcgtga

SEQ ID NO: 11 - DNA, 4377 bp, Salinispora pacifica
  source 1..4377: mol_type = unassigned DNA
atgccttacacccttggattggatttaggtagcagctcccttggttgggcgctggtggatgaagaacaacagaacataatcaagaccggagtgagagttttccctggtgctgccacggatattggaaccgggaaggaatcatataagaaccaggatcgccgtttatcccgccaggctcggagacagacactcaggagaaagcagcgtcgaatagtcttattgagaacactcgtagacttcaaaatgtgtcccttgagcaaagatgaacttgaaagttatgcaaaataccggaaaggaaagaaacaagaatttccatcctcatccgaatttaattcttggttaaaactaaatccatacgagttgagagatagggcattgcatgaagacatttcccggttcgagtttggaagaatcctctatcacataattcatcatagggggttcaaaaccggacgtaaaagtaatgaagatggtgctctatacaaagggaatgaagacaccgtcggtgtagatgagacaaaaaatcttcttcaacaatatgcaacccttggtgagtacttgaattcactccggattaagtctgatggcaatgaacgattacgagggcgttacaccctccgcaactggtatgtagacgaattcaataaaatttgggaacgtcaggcaggaaagcttggacttgaaaatgagactgtacatagcagaaacaagcggtactacggaccagccgggagcagtgaacacaggcgcaagcttcaagcatataaaaaggctggaatttcgttcgaaatcgagggtgattttatctgccgcgaacaaactgtgagcttgaaggattaccttggcaatccagacaaaggaattcttttctaccagaaaccattgaaatcgcaaaagcatctcctgagcaaatgccgctacgagaaaagaaagtcagtatgccagatatctcaccctgagtttgaatactacagagctatgcaatttgccaatcaaatcgagtacggagcgggggaaaaactaaacgagactgatcgcaaagatgtaatcattcttcttctctcaaaagataaagcagttaagatgagcgatttaaaaaagaagattcaaaaaactggagtgcaattcaattatgcagatgatcataaagttcccggcagcccgacaactgcctttatttccaaggtgacggacacttctaacgttgaaaatattgattgggaacttttccattctatctggaacgatctcgtgttctacgataaaagcgaaaaactcaaagagaagtttcaaagaagctataacattgatgtttccattgagcagcttaacaaatacaagataaacaccgattacagctcactctctctgaaggcggtacgaaatatcaatccatttcttcagatggggatgctttacaatgacgcagtaatatttgccggaatcaggcgtgtgataggtgaaaaatcatttgatgcaaatgctgatgaaatcatttcacacgtttccaaattgaaagaaaaaaataaccgggatgtgaaccaaagtttcactgatgcgcttcgggaatatgttatgcagacattcaacatttccatgaatcagacgtataagttgtaccatcacagtcaggagatgagtgtccagaacaatcgttactatctcagtgaactaccaaaccttcgcaaccctattgtacagcaagcattgcaggaactgcgaacactcgttaacactctcgtagagcaatatctccctgacggagagcaattcagtaaaatcaaagtggaacttgcccgggaattgaagctcccgagagatgtgcgcagacgaatgcattgggagaataatcagcgggcagagcgaaacaacgatgcaaaaattgaactgcaaaaattcggtctttcacccagccgtgaaaatatccaaaagtatattctttacaaggagatacagaacagcgttcaaggtcaaagtgttcaatgcccctacacaggtcaatccttggctataaccgatgtatttggtaacgacaacaaggttcaagtagagcacataatcccatatagtatttccctggacgacagcctgagcaataaaaccctttgcatcgccgaagaaaatggaaaaaaaggagagaaaacgccgtaccagttttataaatctgatcccgatcactgggaagtagtgaaggcaagagcctttacacttctaccttacgaaaaagcaaagcgatttgtatccacccgtgattacgagccagaagcatttttacagagacagctcaatgatactcgctacatcagcaaggctgcacgggattatctttccacaatttgtgatcaagtctatgttttcccgggcagcttgacagcaaaagtcagaagaatgtgggggctaaactcaatactatcacctccaatcaaaaccaatttcgaaggaaatgcaggaatgtattgggcggtaatgaatgacgacggggtcattatcgaactaagcgaacaggaactccctcctccagcgatacgggcatctgatatccttataagtggagaaatgaaaaacggcatattcaaagttgatcgtaaatttacagggcaaagccaaacacgagaagtaagtgtagagcatcgtacatacgattctcccgggtggatggtttactcactattatcagttgaaaaatatctccctttattctcaaaactaccctcacaagataccaaatccatctggctgaaaggccgtgctcaggtaaaagatcgcgagtcaccatctctcatgttgaattccttgcctgttaaactgatgcttccccctggagaatatgatgataatgccccatattgggtgaatatacccgtgaatggagaacttcgttgggagaagagaggggaaaagccgggtaaaaatgagctattgattaaacgaaccaagcatagggatggaaaagttgaagcttttatcgacaaacgaaagtgtctgttcgatatcccccctcaagataataaatctgctttgattatcccattagaccttcaggagatacttcaggtcgtgcggatgtttacacctactcctgcaatagcggaacatcagttcctcattaagggtaaaattgaccaaagctacagatttaccgcggaaagcaatttcagaatagctttggatgctcctgaaggaaccccatccggccccgcattcgctatagctaactgtgaaccacgggatatgcgtttttatccgaaaaagaacataaaacctaaaaacggaaagggaaaaaatgtcctttccggttttgtgttccaggaagacgggagtcttgtatttaaccccggaaaaaaccgtatggatcatcgacatcacgccatagatgctctgacaatagccctactgaatacggggcagttgcgggaacttagcggatattttttaaagatcaagaaaagacagcgctacagcgctcctaagccacagttcccgttaccctgggacaactttcgagccgatgcattaaattcaattaacagcattctggtggttcatcgccaaaatagggaaataatcaagagaataaaaaagaacacaagacttaatggacgcacatatgtatcccaaggcatgagtgtgcggggtcaactgcacaaggacactgtttacggtaagcactatataccgggaagtgatgaaccgggataccacgttcgaaagcaaataacagatttgacttctctgagtaaaattgctgatgctggcacacatgaaattcttcgaacgttcgtcgaagaaaatggttactccattgatgagaaagaaaaagtaaaaggtgaatggtttacaaagggtaatgattaccaggttataatgccaagctccggtaagcccggaaatccaataaagaaggtgagaatcagggagaacctgggtaatgcagtgcaatggcatacaggtataaaccagtacgtgaacccacgcaataactacgcattcatcatataccgtgattcagacggcaactataaagaacacccggttactttctgggatgctgttcaggcaagacttgctgggaaaagcgtttatcagcttccggaacccggtaagattattaccacccttcacataaacgatacgtttttgcttggattaggtgatgagcagctgcagggagatcttccccaggagcttgtctcacggcatctataccgggtacagaagttgtcttcaatgtattactgcttccgccttcatacagaaagcacattggatcgagattttgagccgtactacctcgggatacaaagcttcaaagcttggaaggaacaaaatccgttaagagtcaaggtagccaccaccggggaggtgaatttagaatga

SEQ ID NO: 12 - DNA, 3213 bp, Sulfitobacter donghicola
  source 1..3213: mol_type = unassigned DNA
atgcgtttgggtttggacatcggtagcacgtcaatcgggtggtggatttatgaaacgacggacggccagataacatctgtcattgatggtggtgtgcgtattttctctgatgggcgtgaccccaaatccaaaggatcactcgccgtggatcgacgcgtggcgcgggcacaacggcgcaggcgagatcgatatttgcgacgtaaagcggccctgatgaaacggatggcggaagttgggttgatgccgtcggacccgaagcaagccaaacagttggaagcactcgatccttatgaactacgggcacgagggctcgatgaaacacttgaattgacagaactcgggcgggctttgtttcacctgaaccagaggcgagggttcaaatcgaaccgcaagaccgatgcaggcgacaatgaaagcggcaaaatcatagacgcgacagcgcgtctggattgggccatgcgggaccatagggcgcggacgtatggtgaattcctgcacatgcgtcgccagaaggccgacacacctcgtacgacgcccgccgttcgcacgcgccttacgattgctgcgcgggatggggctgaaaaggaggagtccgggtatgatttctatccggaccggcagcatctgcgcgatgagtttgatgcactttgggaggctcaggcggagtatcatggtgtcctaacagaggacttgagagatgaaataggcaccatcattttccaccaacgtcccctgaaaacaccgaaagtcggcaagtgcttgttcaccaatgaggaacgtgtggcgtccgcccatccgctgaaccaacggcgcattctagttgaaacggtaaatgcgcttcgcgttgcccagctgggcgaagtggcgcgtgctctgacgttggaggagcgcgacacgattttgcacgcgctggacaacaaggcacatacgaaatcgctgtcggggatgagcataaagctcaaggcgcttggaaaggttatcaagctgcggtcagggcaatatttcacactcgagactgccaatcgtgatgctatcgcctgtgatccggtccgcgcaagcctgtcaaaaccggatcgcatcgggtcgtattggtcgaccctggatcataacgctcagtgggaggtcgtaaaccgcatccgcgctgtgcaaagtgacgcggaccatagggaattggtcgcctggttggtgtcgcaacaccgcctggctgccgaacatgccgagggtgcagcctatgcaccgctgcccgatggatatagccgtttggggatcactgcaacaaaacggattcttgcagcgctggaagcaaacgttatcccctacagcaaagcggttgaaagttgtggttggcaccattcggatgagcgcacaggtgaggtgctggaccggttgccctattatggtgaaatccttgatcggcacgtcatccccggcacttacgatgacagtgacgatgatatcacccgctttggacgcatcaccaatcctacggttcatatcgggctgaaccaacttcgccggttagtgaaccggatcatcgaggtgcatggaaagccagacgaaattgtcgtcgaactcgcccgtgatttgaaactgtcacaagaccaaaaggcggacgttgaacgaaccatcaagaaaaacacacaagcggccatccggcgaggtgaaaagcttgaagagatgggcgtgcctaacactggcggcaaccgcatggttctgcgtctttgggaagatttgaacgacgatgatgtgatgaaacggttctgcccctacacggggcaacgtatcagtgcgggcatgttgtttgatggttcttgcgatgtcgaccacatcctgccgttttcacggacactggatgatgggttcaccaacaagacgctttgcctgaaagaagcgaatcgaaagaagcgcaactatgcccctcatgaagccgctgaaaagggcctgcttgatcgtgatgcgatggactcggtggcgaaatatctacctgacaacaaagcttggcgttttgcgcccgacgcgatagagcggttcgagggcgaacgcgatttcaccgcccgcgcgctaaaagatacacagtatctatcgcggctggcacgaacttatctagatgcgctttatgatggtggtgatgataaatcccacgtctgggtggtgccgggacggttgacggaaatgctgcggcggcattggggccttaacgggttggaagctctggctgacagtgatgagaaaaccgtcaaacgcaagaatcggaccgatcatcgccaccatgcgattgatgcggctgtggtcgctgccaccgatcgcagtttgatccagaagattagcaagatagcggccagtgatgaacaggcaggcgcagaggacacgctgaaatccacgccgccgccgtgggacagttttcgcgatgacattgccgcccaattgcaaaacattaccgtcagtcatcgcgcagatcatggacgcacggactcactggcgaagggcagaggcgaagacaccaccagtggggcgctccacgaagcgacagcgctcggtatcattgacgaaacccacgtaaccgtacggattcctatcgaatcactcaagtcaggccatctgatcgagggtagccgcaatggatatatccgcgacccttatctgcgcgaccaactgacacttgccacgaaaaacgggtctgacaaggatttcacgacagtgttgcaaaagttctttgaccggagcaaacggtacggaggcacgcggcgggtgcggattatcaaaacgctccaagataccgcgcggatttcggtgccgcataatgcccctatcaaggcctataagggcggcagcaatcatgcgtttgaaatctggcgtttgcccaacggcaagattgagtcgcaagtcatcacgacgtgggaacatcataatctgactgagcccaagcgcccgcatccagcggccaaaaggatcatccggctgcataagacagacatggttgcgattgaacgagacggtaagacggtcatttgttttgtacaaaagactgacccttccaatggtgcgtttttggtgccccacttcgaggcgaacgcggatggccgaaagcggaaaaacgaaccagtcgagtggtatcaaatgtcagccaactctttgatcaaggccgatttgcgtcgtgtcggcgtcgatgaaatgggccgcgttcgcgaccccggccccccgccgattaggtaa

SEQ ID NO: 13 - DNA, 3135 bp, Mucispirillum schaedleri
  source 1..3135: mol_type = unassigned DNA
atggcggaaaagaaatttaaataccgtttaggtcttgatttaggaacaaactctataggctggtgtatgcttaggttaaataaggataacgaaccagctgcagttattaaatcaggtgttagaatattccatgatggaagaaatgaaaaaacaaaagagcctttggcagttgtccgcagaaatgcccgcagtattagaagaaatcttgatagaaaaatatcccgcagaaatcatctgttaaatacattagtaaaatatttcctattgccatcaaatgaaattgagagaaaagcattagcagttttaaacccttatgaactaagaagcagggcagtaaatgaaagattagaattatttgagcttggaagattattaatgcacctttcaaaacgcagaggatttaaaagcaacaggaaagtagataaagaagacagcagtggtaaaattaagccagctatagaaagattaaaaaataaaatgcaggaaactaataaaaaaacagctggtgagtatttatattctctaatgcagaatggtaaaccagtcagagcccgccttggaagaatagacggaagtaatggatatgagatatatttagacagggctttaatagaagaagaatataatcttataatgaatgaacagaaaaaacatcataaagaattaactgatgatattattaatgagatatttaatataattttttatcagcgaccattaaaaaagcaaataatagggaaatgcagtttaactggtgaagatactaaactgaaaaaagcacatgtattggcacaagattttattttgctgcaaaaagtgcaggatttacgagtatttgatgataatcagttagaatttagaccattaagcaatgatgaaaaagacattattaaaagagaattgcgaaagaaaaaagaagtatcttatgaaaatatacggaaattgttaaagaaatattatgaaaatgttaaatatggtatgttctcacatgaaacattatataaaaaattacaaggtaataaaacaaatgctttaatgtcagataaagagattataggtgacagctggtatagtttatcgccagaagttcagtatgacataatagaagaattatattctgataaagataatgatgaattaagtaaattatattctgaaaaatttaacttaaatgaaagccagataaatggcttattaaataaagccatttatagacttgacagtggatatatcaggtatggaaaaacagcagttacaaacttaaacagcataatggataaagataatttaaatttacacgatgctagagaagaagcaggctatgaaaaggaaaataaacaagatgcatctgaatatctggaatattatggtaaagtgcttccagacagtgtagtagacccacaaattgaaaatcctaaaaatgatgaagaaagatatggtaaaattgcaaacccaacagtgcatgcagctttaaatcaattaagaaagttagttaatgaattaatcaagttatatggcaaaccagagcagatagttatagagcttgccagagatttaaaaaacagtagaaaggcaaaagatgttattaataaaaaaatagcagaaaatagaaaacttaatgaagaagttgataaaacactgcaggagtattcagaaaaatataacacacatattgtaaaaaataaattaaacagagataaagttaaattatggcgggaattagggaaagacccattagaaaggaaatgtatatatactggagagcaaataaatatagcaaaattattcagcgacgaagtgcagattgagcatattgtgccatattctaaaacattagatgatagttttaataataaaactctttcaatgaaacaagcaaattattataaaggcaataaaacaccttatgaagcatttaaagacagtaaagacggatataattatgacgacataattgcaagggcaaagctgcttaataatgacaataaatttaaaagatttacaaaagatgcaatggatatatataatagagatggtaaagattttattgcaaggcagctttcagatactcagtatttatctacacgggcacttatctatttacagtcattatatgaaaaagcacatcacagctctatttggactataccgggtcagttgactgcacttattcgcaactatttaggcttaaacacattaatttctaatgataaaaataaaaacagaaatgaccacaggcaccatgcagtagatgcatttgttgtggcagtaacaagccgttctttactgcagaaaatatcttatgcagcttcattacaggaagatttagataatagaaatgtatcatcatatagaaataaattacttgaaaaaatgccagagccttttccaaattatagaaaaagtctggagcttgctattgataatataaaaacttcccataaagcagatagaagtatatctggtaaattacatgaagatactgcttacgggatagttgaaaatgatgacaaatataatgttgttacaagatggacagtagataaatttaaagagcaaaaacattttgaaaccataagggataatgaattaaaggaaattgcatgtagtgataaagaattatttgctaagatagtagaaacaagaaaaataaaaagcattagaaagctggcaaaagaaaaccctgtaattaaaataaaagataaatcaggcagggactataaagcctttgcaggtggtaataatatttgtgtagagatatatgaagtagatggtgtaagaaaatcagaagttatacagttatttgatgcagcacaaaaaggatttatgccagaatggatgaaaaaatatcctaatggaaaattacttatgcggttatttaaaggcgatgtaataggatttatagagaatagaaaatataattattatacaattaaaggtattagtattgcagaccaaaatcttaaattacttgcaattaataaagctgaaggtatatttaaaaaaggcttaaatatattgtttgatagtaataataaaaactctttaaatgctaaacagtttaatataagtgtaacgggcattgtcactaaaaagaaaacagcagatgttaatttttggaaaaatagaaagtga

SEQ ID NO: 14 - DNA, 3357 bp, Mesorhizobium sp.
  source 1..3357: mol_type = unassigned DNA
atgggcacgcgctattccttcgacatcggcacgaactccataggctgggccgtctggcgcacgggtcgcgaccccaagggcatcttcggcgagaaggatgcgccgctggaactgctcggcgccggcgtgcgcctgttcaaggacggccgcaacccgaaggacgggcagtcgctggcgacgatgcggcgcattccgcggcaggcgcgcaagcgccgcgaccgcttcgtgctgcggcgcgaggcgctggtcgcggcattgatcgaggccggcttgatgcctgccagcgagaaggagcgcaaggcgctggcagacctcgatccctatcagcttcgcgccgccgggctggacaaggcgctggcaccgcatgaactcggtcgcgcaattttccatctgcatcagcgccgcggcttcaagtcgaatcgcaagacagaccgcaaaagcgacgacagggacaagggcaagatcgcgacggcttccgccgcgcttgcaaaaaaattcgaggacgaaaacgcgcgcaccttcggcgaattcctgtggcggcgtcatcgcgaccccgacatgaaacggcaggccgttttgaaagcgcacgacccggccaaagggaagccggatctgcgcgccgcaaagctacgccagccgacccgcatccgcctcgaaggccagggcgcgaccgcgctctacgaattctatccgacacgcgaaatgctgtgccatgagttcgacgcgctctgggaagcccaggcccgccatcatccaatgctgcttacgcgggaagcaggcgacaagatcagatcgatcctgtttcggcagcgcgaactgaagccgccgttaatcggcctttgcactttcgaatacgcggctggcgaaaaggaaagccgactgcccaaggcgctgccttccgtgcaggcgcgcgagatctacgaacggctgggccatatccgcctttccaccggctccggcacggaccgcccgctaaaatcctccgaacgcgacgatttggcgacagcgctgctgcattgcggcctgacgaagatcaaggtcagcaagaccaaagggttggcctttaagactgaattccgcaaggcgctgcgtctcggcggtgaggtcaggatcaatttcgaggaaatgggcgaggaagggttggtcgacttgcgcaccaaccgcctgctcgtccaagacgaccattacggtccgcgctggcgcgcattgtcgtggtcgggcaaggacgccttcgtaaaaaaactgctcgaagcgaccgacgacgacaaactggtcgcccggttaatgaccgaggacggcctgagcgcagtgcaggcgcgcaacgccgcctcgatcccgctgcccgacggctattcgcggctggggccaaccgccaacgccgcgatcctccaggcactgatcgactcgcgcgacgaaaacggcttcgtcgtcacctacgacaaggcggttcgccgcgccggcgagaggctgggcaaggactggcaccattccgatgagcgcgacggcgaaattctcgatgccctgccctattacggcaaggtgctgcagcgccacatcctgcccggcatgatggacccggccgaccgcaaggacgaggcgaaattctacggccgcatcatgaacccgtcggtgcatatcggtctcaaccagttgcgccgactcgtgaacgcgctgatcgaacgcttcggcccgcccgaccagatcgtcgtcgaactggcgcgcgacctgaagatgtcggcgcgcgagaaggagcaggaacagcgccgcaaccgcgacaaccgcgaggcgaacgaaaagcgtactaagaaactggtggaactggggcaggacaacaacggcgagaatcgggcacggctgaaactctacgatgaacagcaacgcgccggcaacggcgtggcgcattgcccgttcacgctcgatccgatcggcatcacgcagcttttcagcccggaaatcgagatcgagcacgtcctgccgcgctcgcgcacgctggacgacagcgccgccaacaaggttctgtgcttccgcaccatcaaccgcatcaagcgcggcaagacgccttgggaagcctttcacgccgatccgaaatggccggacattgccgccaatgccgaaaagctgccgcccaacaagcgctggcgcttccgcgaggacgcgatggacgtcttcgaggcgcgcacctcaggcaagatggacaagaccacgctggagcagatgggcctcaccaccggtttccaggcccgtcacctcaacgagaccaagcacatgtcgcggctggccaaggcctatctcggcaagatctgcgaccccgacgcggtctacgtcacgcccggcgcgctgaccagcttgctgcgcggcaagtgggggctgaattcgatcctctccgacgacaacctcaaagaccgcaccgaccaccggcaccacgcgatagacgccatcaccatcggcgccatgacgcgcagcctgctgctcgagttgaacacgttggccggcaaggccgagcaaagcgactatgacgacgtggtcggcaaggtgccctggcctttcgacaatttccgtgacgccgtgcggtcggtggtggaccgcgtcgtcgtctctaacaagcccgagcacggcaagcagggcgcgctgcatgaagacaccgcctacggcatcgtcggcgacgaggccgaggcggaagagatcggcaatctcgtgcgccgcaagctgctggtagacctgacgcccggcgaggtcgaccgtattcgcgacgcaggacttcgcaaggcgatgcaggccgcggtggcgccgtctcgcgacgccaggggcaaggtttccgacgccaagggctttgccgcagcgctcgataccttcgccaaggcgcaagggatgcgtcgcatccgcgtcggcaaggaggacatgagcgcggtgacgatccacgaccggcaaacagacaaggcctataaggccgtcgcacccggcgaaaaccaccatgtcgatgtcgtgcaaatgcgcgacggcgcatggaaaggctttgccgtcaccgtttttgaagccaaccagaaggacttccggccgcagtgggagcgcgagaaactgggcggcaagctggtgatgcgtctgcacaaaggtgacgcggtggagttggaaagttcaggcgtgcgcctcgtcaaatttgtgcagcaaatctggatgaaatccaacctcgtactgcttaccgagcacaatgagggcggcgacttgcaaaagcgccaccaggacgccgacgatcccttccgctgggacttcgccaacatcggcaaactcaaggagcgcggctgcgtggcggtcaaggtggatgaattgggaagggtgaccaagcgcatttcaaacacataa

SEQ ID NO: 15 - DNA, 3249 bp, Neisseria meningitidis
  source 1..3249: mol_type = unassigned DNA
atggctgccttcaaacctaatccaatcaactacatcctcggcctcgatatcggcatcgcatccgtcggctgggcgatggtagaaattgacgaagaagaaaaccccatccgcctgattgatttgggcgtgcgcgtatttgagcgtgccgaagtaccgaaaacaggcgactcccttgccatggcaaggcgtttggcgcgcagtgtccgccgcctgacccgccgtcgcgcccatcgcctgcttcgggcccgccgcctattgaaacgcgaaggcgtattacaagccgctgattttgacgaaaacggcttgatcaaatccttaccgaatacaccatggcaacttcgcgcagccgcattagaccgcaaactgacgcctttagagtggtcggcagtcttgttgcatttaatcaaacaccgcggttatttgtcgcaaagaaaaaacgagggcgaaactgccgataaagagcttggcgctttgcttaaaggcgtggccaacaatgcccatgccttacagacaggcgatttccgcacaccggccgaattggctttaaataaatttgagaaagaaagcggccatatccgcaatcagcgcggcgattattcgcatacgttcagccgcaaagatttacaggcggagctgattttgctgtttgaaaaacaaaaagaatttggcaatccgcatgtttcaggcggccttaaagaaggtattgaaaccctactgatgacgcaacgccctgccctgtccggcgatgccgttcaaaaaatgttggggcattgcaccttcgaaccggcagagccgaaagccgctaaaaacacctacacagccgaacgtttcatctggctgaccaagctgaacaacctgcgtattttagagcaaggcagcgagcggccattgaccgataccgaacgcgccacgcttatggacgagccatacagaaaatccaaactgacttacgcacaagcccgtaagctgctgggtttagaagataccgcctttttcaaaggcttgcgctatggtaaagacaatgccgaagcctcaacattgatggaaatgaaggcctaccatgccatcagccgtgcactggaaaaagaaggattgaaagataaaaaatccccattaaacctttcttccgaattacaagatgaaatcggcacggcattctccctgttcaaaaccgatgaagacattacaggccgtctgaaagaccgtgttcagcccgaaatcttagaagcgctgttgaaacacatcagcttcgataagttcgtccaaatttccttgaaagcattgcgccgaattgtgcctctaatggagcaaggcaaacgttacgatgaagcctgcgccgaaatctacggagaccattacggcaagaaaaatacggaagaaaaaatttatctgccgcccatccctgccgacgagatccgcaaccccgtcgtcttgcgcgccttatctcaagcacgtaaggtcattaacggcgtggtacgccgttacggctccccagctcgtatccatattgaaacggcaagggaagtaggtaaatcgtttaaagaccgcaaagaaatcgaaaaacgccaagaagaaaaccgcaaagaccgggaaaaagccgccgccaaattccgagagtatttccccaattttgtcggcgaacccaaatcaaaagatattctgaaactgcgcctgtacgagcaacaacacggcaaatgcctgtattcgggcaaagaaatcaacttagtccgtctgaacgaaaaaggctatgtcgaaatcgaccatgccctgccgttttcgcgcacatgggacgacagtttcaacaataaagtgctggtattgggcagcgaaaaccaaaacaaaggcaatcaaaccccttacgaatacttcaacggcaaagacaacagccgcgaatggcaggaatttaaagcgcgtgtcgaaaccagccgtttcccgcgcagtaaaaaacaacggattctgctgcaaaaattcgatgaagacggctttaaagaatgcaatctgaacgacacgcgctacgtcaaccgtttcctgtgccaatttgttgccgaccatatattgctgacaggtaaagggaaaagacgtgtctttgcctcaaacggacaaattaccaatctgttgcgcggcttttggggattgcgcaaagtgcgtgcggaaaacgaccgccatcacgccttggacgctgtagtcgttgcctgctcgaccgttgccatgcagcagaaaattacccgttttgtacgctataaagagatgaacgcgtttgacggtaaaaccatagacaaagaaacaggaaaagtgctgcatcaaaaaacacacttcccacaaccttgggaatttttcgcacaagaagtcatgattcgcgtcttcggcaaaccggacggcaaacccgaattcgaagaagccgataccccagaaaaactgcgcacgttgcttgccgaaaaattatcatctcgccccgaagccgtacacgaatacgttacgccactgtttgtttcacgcgcgcccaatcggaagatgagcggtgcacataaagatactttgagatctgctaaacgatttgttaaacataatgaaaaaattagtgttaaacgagtatggttaaccgaaatcaagttggccgaccttgaaaatatggttaattataaaaatggtagagagattgaattatatgaggctcttaaggcgcgtttagaggcatatggaggtaatgctaaacaagcatttgaccctaaggacaatccgttttataaaaagggaggacaactggttaaagctgtgagggtcgaaaaaacccaagagagcggagtcttattaaataaaaaaaatgcttataccattgcagataatggagacatggtacgtgttgatgtgttctgtaaagtagataagaaaggaaaaaatcagtattttattgttcccatctatgcttggcaggttgctgaaaacattcttcccgatattgattgtaagggataccggattgatgatagctatacattctgttttagcttgcataagtatgatctgattgcttttcaaaaagatgaaaaatctaaagtagaattcgcctactatatcaactgtgatagctctaatggacgattctatttagcttggcatgataaaggctctaaagaacagcaattccgtattagcacccaaaatcttgtattgatacaaaaataccaagttaacgaactgggcaaagaaatcagaccatgccgtctgaaaaaacgcccacctgtccgttaa

SEQ ID NO: 16 - DNA, 3264 bp, Geobacillus sp.
  source 1..3264: mol_type = unassigned DNA
gtgagatacaaaatcggccttgatatcggcattacctcggtcggctgggcagtcattaatctggatattcctcgcatcgaagatttaggcgtccgcatctttgacagagcggaaaacccgcaaacgggagaatcactagctctccctcgacgcctcgcccgctcggcccggcgtcggctgcgccgccgcaagcatcgtcttgaacgcattcgccgtctgctcatccgtgaaggagtcttaacgaaagaagaactggacaagctattcgaggagaaacacgaaatcgacgtctggcagctgcgcgttgaagcattggatcgaaaactaaataacgatgaattagtccgtgtcctccttcatctagccaagcggcgcggcttcaaatccaaccgccaaagcgagcgcagcaacaaagaaaacagcacgatgctcaaacatatcgaagaaaaccgggccattctctcaggctatcggaccgtcggcgaaatgattgtgaaagatccaaagtttgcgctccataaacgcaataaaggagaaaattatacaaatacgatcgcccgcgatgacttagaacgcgagattcgactcattttctccaaacagcgcgagtttggaaacatgagttgtacagaagagtttgaaaatgaatatatcgccatttgggcttcgcaacgtcctgtcgcttccaaagatgatatcgagaaaaaggtgggcttttgtacatttgaaccaaaagaaaaacgggcgccaaaagcaacatacacattccagtcattcatcgcttgggagcacatcaataaattgcggctcatctccccatcaggcacacgggggctcaccgatgaggaacgacgccttttgtatgaacaggcattccaaaaaaacaaaatcacctaccatgatatacggacgttgctccatttgcctgatgatacctactttaaaggcattgtgtacgattggggcgaatcgctaaagcaaaacgaaaacatccgattcctcgaactcgacgcctatcatcaaattcggaaagccatcgataaagtgtatggaaaaggaaaatcaagttcgtttcttcccatcgatttcgatacattcggttatgccttgacgttgtttaaagatgatgccgatattcgcagctacttgcgaaacgaatatgaacaaaacgggaaacggatagcaaatttggcgaacaaggtatatgacaacgaactgattgaagaactgttgaacttgtcatttacaaaattcggccatttgtcgctaaaggcgctccgcaacattctcccgtatatggaacaaggtgaggtctactcttctgcttgcgagaaggctggatatacatttacagggccaaagaaaaaacaaaaaacggtgctgcttccgactattccgccgatcgtcaatccggttgtcatgcgcgcattgacacaggcgcgaaaagtggtgaatgccattatcaaaaagtatggttcgccggtatccattcatatcgagctagctcgcgatttatcacaaacgtttgacgaacggcgcaaaacaaaaagagaacaagatgaaaaccggaagagaaacgaaaccgccatccgccagctcatggaatacgggctgacgctaaatccaaccggtcttgacattgtcaaattcaaactgtggagcgaacaaaacgggagatgcgcctactcgcttcaaccgatcgaaatcgagcggctgcttgaaccgggttatgtagaagtggatcacgtaatcccgtacagccgcagtttggacgacagttatacaaataaagtgttggtattgacaaaagaaaaccgcgaaaaaggcaaccgcattcctgccgagtatttaggtgtcggaactgaacgctggcagcagtttgaaacgtttgtgttaacaaacaagcagttttccaaaaagaaacgggatcgactgctccggcttcattacgatgaaaatgaagaaatggaatttaaaagccgaaatttaaatgacactcggtatatttcacgctttttcgccaactttattcgtgaacatctgaagttcgccgaaagtgacgacaagcaaaaagtatatacggtcaacggccgtgttacctcccatttgcgcagccgctgggatttcaacaaaaaccgtgaagaatccgatttgcatcatgcagtagatgccgccatcgtcgcctgcacaacgccaagcgatatcgccaaagtcaccgccttttaccaacggcgcgagcaaaacaaagaactggccaaaaagaccgaaccgcagtttccgcaaccttggccgcacttcgccgatgaactgcgggcgcgtttatcaaaacatccgaaagagagtataaaagctctcaatcttggaaattatgatgatcagaaactcgaatcgttgcagccggtttttgtatcccgcatgccgaagcggagcgtcacaggggcggctcatcaagagacattgcgacgttatattggcatcgatgaacggagcgggaaaatccaaactgttgtcaaaacgaaactgtccgaaatcaagctggatgcaagcggacattttcctatgtacggcaaagaaagtgacccaaggacatacgaagcgatccgccagcggttgcttgagcataacaatgatccgaaaaaagcattccaggaacctctgtacaaaccgaaaaagaacggggaaccagggcctatcattcggacagtgaaaatcatcgacacaaaaaaccaagtcatcccgctcaatgacggcaaaaccgtcgcctacaacagcaacatcgttcgaattgacgtatttgaaaaagatgggaaatactattgtgttcccgtctatacaatggacatcatgaaaggtgttttgccaaacaaagccatcgagccgaacaaaccgtactctgagtggaaggaaatgacggaagactatacgttccgattcagcttgtacccgaatgatctcattcgcattgagcttcctcgggaaaaaacagtgaaaacagccgcaggcgaagagatcaacattaaagatatgtttgtctactacaaaacgattgactcagccaacgggggattagagttgatcagccatgacaacagtttctcgctccgtggcgtcggttcaagaaccctcaaacgattcgagaaatatcaagtagatgtgctcggcaacatctacaaagtgagaggggaaaagagagttgggttggcgtcatctgctcattcgaaaaccggggaaactatccgtccgttacaatcaactcgtgattga

SEQ ID NO: 17 - DNA, 3225 bp, Bacillus okhensis
  source 1..3225: mol_type = unassigned DNA
gtgaccgatacaagagattatagaattggcttagatataggtacgaattcaataggttgggccatcattgagttagaatacaatggtgaacagtatgataagaagggtcttattgatgctggggttcggatgtttgataaggctgaaataccgaaaacgggtgcatcattggccgaacctcgtcgtcttgcccgttcaacacgtagacgtttaaatcgccgtgccgatcgaaagaaatcaattcgccgattgatagtggaacaagacattctaaatgaagcagaattacaagtgctttatcaagaaaaggaacttttagatatttggacaattagggtagaggcacttgatcgaagacttagccgtaccgaatgggctagattgctcatacagttggcgcaacgtcgaggctatagatcagcccgaaaatcggaagaaaatgataaggaaacaggcgttgttttacaaaatatacgagaaaataagaaattgattgacgggtaccgaacagttggagaaatgtgggtgaaggaccctcgttttcaaggccgccgtcataattcacgatctgaatacgtatttaatgtcacaagggaaatgcttgaagaggaaattcgaacattatttcatactcaaagggagttgggtttatcgtttgcttcaaaagagatggaagaatcttatctatcgatttggggaaagcagctaccatttgcaagtgggaaagatattttaaaacgggtgggtttttgtactcttgaggaacaagagcgccgttttccaaaagcgacgtttacttttcaatattttatggtattagataaactgaaccgattaaggatcaaaccaagcatgcgtcctttaacagaagaagaacgtaaaagtacattacattatttatttgatcgagatgacttgtctaaaaagaaaacgccacccaaagtaatgtataaagaaatccgtaaacaattgaatctagcagcaactgaaacgtttaatgagctgacatatgatcctaatgaatcgatgacgaaaaacgagaatgttctctttgtgaacttagacgcctattatcgcattaaacaacaatgtgatttacataatgaaagatatggtccgcgtgactatgatgcgctaggttatgctttgactgtttacaaaacagacaaagatattcgtcaatatttacgtaataaaacgaatctagctaataggatttactcggaggaacttatatctaatcttttatcgcaatcatacgctacttttggacatatctcgaaaaaagcgttattagctattcttccatctatggaaaaaggagatacgtttaaggtagcagctgataaaatgggctatgatacgaccgggttacaactagtaaaaaaagagttattattgccagttattcctaatgatataacaaacccggttgttatgagggcattgactcaagctagaaaagtggtaaatgcaattattaaacgtttgggagaacaaccgctttctattcatattgagttagcgcgagaccttttaaaagggcatgatgaacgccggaaaatctcaaatgaatataaacaaaatcataagcgtaatgcgggggcatataccattcttaatgaaaatgggattatcaacccgcgtggttatgatattgtcagatataaactttggcaggagcagaagcaaaagtgtgcttattcagggaaagtcattccgtcagaaactttttttggtgaacttaaaaaagagagagggcaaggggcacccactttggatgttgaccacattattccttactcgaaatgctttaatgattcttattctaataaagtactagtttatagcgatgaaaatcgtaaaaaaggaaatcatttgccttttgactatttgaaagaaagccctagtcgatgggaagagtttgaaacttatgtactgactaatgaatttccaagagcaaagcgagaacgattgttaaaaaaacaattttcagaggatgaagagagtgtgatgaaagagcgtcatttgaatgacactcgctatgcaagtcgatactttaaacaatttgtagagaagtctttacaatttaagaaatcaaagaatcaatttcataaaaagagggttgaaacagttgctggaagagttacagctcactttcgtcaacgttgggggtttgaaaagcatcgtgaaggcacgcatcttcatcatgcccttgatgccattgtcgtcgcctgcaccgatgcagcaatgatacaggccctttcgttgtatcataaacagaaggaagaagggaaaaaagggtatattaaaaggtttccgctcccttggataacgtttcgcgatgatgttttgaataagctgtcagaatcagccatccctgaacaaatttattctgcgttagtttctggaacaacattgccatcgtatatgcttgtttctcgcatgcctagacgatcagtaacaggtccagtccataaagagaccatttctaaagatggcggggtggatgaaaaagggaaaacgcttattgttaaaaaagtccagcttcaggacatcaaatttaacaaaaatggtgattttttaatgtatatggaagagaccgatccagcaacatataaagctattaaagagcgatatctttcttttaataaagatgctaaaaaggcgtttcaagacccactttacaagccaagtaaaaaggggaagcccaatcaaataaaaagtgtgaaagtcattgttgagaagaaagcacatgtacgaaaagtgaatggtggtgtcgctgaaaatggtgaccttattcgaatcgatttttttcaaaaagagggtaagtttttcatggttcctctttatacttatgatacgattcaatctgacctaccgaatcgttatgttgtaagtgggaaaggttatcaattatggcctcaattaacaaatgaacacaaatttatccaaagtgttcatccatatgaattattaagagttgttaagcgttcgggtgacgatcggtttctatacttagcttctattaatatttcaaataatgtattgaaatttattgagcctaatttccctcataacgattatattgaaatctcattagggacgattaaacatatggagaaatatgatgtgaatgtactaggacaagtttctctaaaagcaacgggaccaagattaggcttcaataatatgaaagctcaaaaaaataaagttaaaggctag

SEQ ID NO: 18 - DNA, 3150 bp, Tistrella mobilis
  source 1..3150: mol_type = unassigned DNA
atgatcaacgaacgcctgacgttcggaatcgatcttggcatcggatcatgtggctgggcggtgcttcgccatgcggatgccgccggagagccgggggtgatcgaggggctgggaagctggtgcttcgatgtgcccgagacgagcaaggagcgtatcccgaccaatcaggtccggcgcagcaatcgcctgctccgccgggtcatccggcggcggcgcaatcgcatggcagagatcaggcgtctgtttcatgcccagggcctgctgccttcggcggatgaggacgccctgaagcgtccgcgtctcgacccctgggaattgcgggcccgagggctcgatcaatgcctgagtgccgaagaattcgcggtggcgctcggtcatatcgccaggcatcgtggcttccgctcctccgccaagcgcaaggccgcgaataccagtggggaagatagcaagatgctgtcggcccttctggtgacgagggagcgtactgcccgctatcgcaccgtcggcgagatgttcgcccgcgatccggaatacagtgcacggcgccggaaccgtgacggcattttcgaccggaccgtcgcgcgggacgatctgatccacgaggtcggcaagctgttcgaagcgcagagggcgcgcggcagcgctttcgcctcgcccgatctggaggcggatttcaacgcgatcgcctttcgtcaggcggagatgcaggacagtgaacgtcttgtggggaattgcccgttcgagcgggatgaaaagcgcgccgccagatgggcgccctcgttcgaacgtttccgtctgctgacccggctgatcaatttgcggatcgcgacggccgaaggggagcgcaggttcaccccggaagatctggcccgcgtctcggccgaactcggcgcgacggcaaaactcccggtcagccgcgtgcgcgccttgatcgggcttctgcctgacgagcgtttcaccacgattcgggttgaggacgaggatcgcgatatcgttgcccgaaccggcgaagccgcacccggtacctggcggctgcgcaagaccctgggcgaggcgctgtgggcggagatgcaggcccgacccgatcagctggacgccattgcgcatgtcctgagtttcttcgaagccacggcgaagatccggtcggaactcgaccggctgggactgcccgcggccgtgatcgaggccctggaccgggggctcgaagacggggcgttcgcgaagttcaagggggccggacacatctccgccaaggcctgccgcaatctgctgccccatctgcaacagggccatcgctacgatcaggcctgtcggcttgcaggctatgaccatgctgcatcgaccctgtcgcacacggctcaggtggtgagcaaggccgggttcaacgcgctggtgacggagctgggcgagagcatcgccaatcccatcgcccgcaaggcgctgaccgaggggctgaagcagatccgcgcgatgtgtgcccgctggggcctgcccggcgccatccatatagaactggcgcgagaggtcggcaacagtatcgaaaagcgccgagaactggagagccaacgggagacgacgaccaagcgccgccagaccgagcgggatgaaatccgcgggctgctggctctggaggacgtcgacgacgacaccctgctccgctaccgtttgtggaaggaacagggcggcaaatgcctgtacaccggcaaggacattcatgtccggcagttgatcgccaccgacaacagcgtgcaggtggaccacatcctgccctggtcccggttcggcgatgacagcttcaacaacaagaccttgtgccttgcgagcgcgaatcagcgcaagcgcgggcagacaccctgggaatggttcagcctgaccgggacgcccgaggcctgggaggtcttcgcgagccgggttgaaacctcgaaggatctgcgtggcttcaagaagcgcaacctgcttctgaagaatgccgacgaggtcgctcagcgcttccgcagccgcaatctgaacgacacccgctatgcggcgcggctgctggcggaggctgcgaagctgttctatccggccggtgaccggcaggagaaagacgggcgccgccgggttctgacccgccccggaccgctgaccgcggcgctgcgccatgcctgggggctggagagcctgaagaaggccgacggcaagcgggtgagcgacgaccgccaccatgccctggatgcacttgccgtggcggcgatcagtgaaagggaggttcagcgcctcacccggtctttccaggagtgggagcagcaggggctcgcccgcccgctgcgccatgtggcgccaccctggcccggcttccgcggcgacgttctggcggcctatgcgcaggcattcgtcgcccgccctgagcgtcgtcgggcgcggggcaaggggcatgatgcgagtatccgtcaggttgtcggagagggcccggaggcgcaggtgttcgagcgccggggtctggcggatctcaaggaagcggatctcgaccgggtcaaggatcctgagcgcaatcaggcgatcatcgaggccgtgcgcgcctggatcctcgccggccggccggccgatgcaccgccgcggtcaccgcgcggcgacgtcatcgtcaagctgcggacggcgccggccaaaaagatcaagccggcggtgccggtgcggggcggaaccgccgaccgcggcgacatggtgcgtatcgacgtcttcactaggccgaaccgcaagggccgggacgaatggtatctggtgccgatctatccccatcaggtgatgaaccggaaggcctggccgcatccgccgatgcggtctgttgtggcctacaaggacgaggccggctggaccgagatcggggcggagcactcgttccgcttcagtctgtatccgcgcagctacgtccagctggtgaagtcgaatggtgacgtcatagaaggatatcttgtctcaatggatcggtcgacaggcgctttccgcgtctttgttcataataatcccgcggaaatggcgaaaggaatcggagcgaaaacattgttgaatctcaggaaatttaatgtggatcgctttggggtgcgtactgaagtgaaaagtgaggtcagaacatggcatggagaggtgtgcacatctcccgtcccgcccgattga

SEQ ID NO: 19 - DNA, 3183 bp, Kingella kingae
  source 1..3183: mol_type = unassigned DNA
atggctgcaaaatcattaaattacattttgggtttggatttggggattgcgtcttgcggttgggcggttgtggaaatggacgaacaagaaaatccacttcgtttgattgatgtgggcgtgcggacgtttgaagaagccgaaaaccccaaagacggttcatcgttggcggaaacgcgccgattggctcgcgctcaacgccgtttaatcagtcgccgcgctaatcgcatgaacaaattgtgccgtttattgaaacaagaaaatgttttgcaagccaatgattatgatgaaaaaggtttaatcatcggtttacccaatcaggcgtgggaacttcgcgcacaaggtttggacagaaaacttgaacccaaagaatgggcagcggtgttgattcatttggttaaacatcgcggctatttgtcgcagcgcaaaaacgaaagccaaacggcggataaagaattgggcgcgttgctgtcgggcatgaatcacaatcatcaattattacaatctcaatctaatcaatatcgtacgccagcagaattggcgattaaacaatttgccacgcaagacggacacattcgcaatcaacgtggcgcgtacacgcacacatttaatcgtttggatttgcaaaatgagttaaatcaattatttgacgcgcaaacacgtttgggcaatccgcacgtttcaggcagcctgaaaaccgcgattaatgatttattgatgaaccaaaaagctgctttatcgggcgatgcgattctggaaatgttggggcgttgcacgtttgaaccgagcgaatacaaagccgcaaaaaatacatacagcgcagagcgttttgtgtggctggggaaattgacgaatttgcgtattcaagacaatggcttggaatctgctttatcgcgtgaacagcgtgaattgttattgaacgagccatacaacaaaacaaaattgacctatcaacaagttcgtaaattgttaaggctgcctgaaaccgcatttttcaaaggtttgcgttatggaaaagacaatgccgaatctgccactttcatggaaatgaaatcgtatcacgccattagaaaatctttggaaaacaaatcgttgaaatcagaatgggaaaagctgaaaacgcagcctaaactattagatttaatcggtacggcattttccatttacaaaaccgatgatgagattgcaggctgcctgaaaaatcaattacccgaaaatgtgataattgccttgcaagggcagttaaatttcagcaattttatggaattgtcgttaaaagcgttggaaaaattgttgccgttaatggaacaaggtttgcgctacgatgaagcgtgtacgcaaatttacggtaatcgtcacgaaaaaattgccgataaaaccgaaaaattcttgccgaatattcctgccgataaactgcgaaatcctgttgtattgcggacgctcacgcaagcgcgaaaagtgattaacgcgattattcgccgatacggttcgccagcgcgtgtacatattgagacaggacgagaagtcggtaaatcattctctgaccgcgataaattaaaaaaacaacaagaagaaaatcaagaacaacgccgacgcgctattgatgaatggaaacagtttttccccaatgcagcgcatgaacccaaagcggtggatattttgaaattgcgcttatatcaattacagcagggcaaatgtttgtattcaggtttgccaattgatgttcgcaggctgcctgaaaaagggtatgtggaaattgaccacgcgctgccattttcgcggacttgggacgacagtttcaataataaaatcttagtgttggcttcggaaaaccaaaacaaaggcaatcaaacgccatacgaatatttacgtggtgcggacaacagcgagagttggcggttatttgtggaaaatgtgcaaaattgccagttttcgcccaataaaaagcaaaaaatcatggcaaaacagcttgatgaaaaaggttttcttgaacgcaatttgaacgacacgcgctatgtttcgcgctttttgtgtcaatttatcagcgagcatttgcatttaacaggcaaaggcaaaaagcgcgtgtttgccagcaatgggcaaattaccgcgttgttgcgtgggcgttggggtttgagcaaaaatcgtgaagaaaatgaccgtcatcatgcggtagatgcggtggtggtggcgtgtagcacggttgccatgcagcaaaaaatcacgcaatttgtacgttatcaaaaaggcaatgtgttcacaggcgaacgcattgacaaggaaacaggcgaagtgatttcaatccattttccaacgccttgggaacatttccgtgaagaagtgatgattcgtgtatttgatgataatccgctccgaacgctgcctgaaaaattaccaaaccgccccgaagccttgcatgaatacgttatgccgttgtttgtgtcgcgtatgccaacgcgaaaaatgactgggcaaggacacaaagaaaccattaaatctgccaagcgtttagacgagaaaatcagcgttttgcgcgtgccattaacgcagttgaaattgaatgatttggaaaacatggttaatcgtgaacgtgaacctgctttatacgaagccttgaaagcgcgtttggaacaatttaaaaatgaccctgcaaaagcctttgctgaaccattcttcaaacaaggcggacagcaagtcaaagccgtgcgcgtggaaatcgtacaaaaatcaggtatgttgttacgcaaaatcaatggtgtggcggataacggttctatggtgcgcgttgatgtgtttgagaaatcaggaaaattttatcttgtgccaatttatgcgtggcaagtggcagaaggcattttgcctaattatgccgtagtggcacataaagatgaaagcgattggattttaatggacgaaagctatcattttaaatttgctttgtataaaaatgatttgctagaagtgcaaacaaagaaagggggcattatgggttattttgcaagtttagaccgtgcaacaggtgcaattaccattcgtgaacatgaccgtgataagaaaaaatgtaaagatggcgaacatcgaagcattggtgtgaaaatggcttcatcattcaaaaaactgcaagttgatgaattaggtaaaaacattcacgaaacacgtagcagaaaacgcccaaatattggctaa

SEQ ID NO: 20 - DNA, 3200 bp, Clostridium perfringens
  source 1..3200: mol_type = unassigned DNA
gtgaataaagatattaattatgctttaggattagatataggaataacatctgtaggttgggcagttataaacttagatctaaatagaatagaagatttaggagtaaggattttcaatgcagcagaaaatctaaaggatggatcttccttagcattaccaagaagacttgcaagaggtagaagaagattgcttagaagaaaagcctatagagttgaaagggttagaaaacttatattaaagaataatatattaactaaagaagaacttgaaggtttatttaaaaataaagaggtaattgatgtctgggaagcaagggttaagggattagactataaattatcaagagaagaatgggcaaaaattttaataaatttttgtaagagaagaggatttaaatctaatagaaaaaatgaggcaaaagataaggaagcaggacaaatattaagtagcattagctataacatagaaaagatgaaggaaacaaattcaagaactataggagagtatatttataatgaagttaaaaattcagaggatagttatgctcctttaaggaataaatttggtgaatataagatgtgtgtttctagagatgttattagagaagaaatacatactttgtttgaaaaacaaagagaattaggcaataactttgctagtgatgaaatagaggataagtattttgaaatatttaattctcaaagacctttttctaattttgaagatttagaaaagcttgttggattttgtacttttgaaagaaagaaacataaaagagcaccaaaacattgtatttcttctgaagaatttactttatatgaaggaatcaataaactatcaataataaaagatggagagaaaagaaagctttcagaagaggagagaaccttagttgttaatgaggcttttaataaaaaagagataaaatatacaactttaagaaaattactaggattaagtgaagaggaacttttctcaacattgacttatagcattgataaagatatatcaaaaacagagaatacaaaatttgtttctctaaaaggatatcatgaaataaaaagagctatagaaaaaggagtttctaaaaaagcttggcaggatattgaaaataatagaaaccttttaaatgacatagcctatgtattgaccttaggaaaaacagatgatgaaattgagaagcagttaagacttagaaatgttccagaggaattatttgaatctttattagatatgtctttcaataagtttaataatttatctatatatgctttagaaaaaatattaccttttatgaaggaaggatatcaatataatgaagcttgtgaaaaagctggatataattttaaagctatttatgaaggagtaagaactaaaaagttacctgttatagaaatagatgaaatagtaaatccagttgtaaatagagctttagctcaaactagaaaggttattaactctgttatagataaatatggttcaccagttaggataaatatagaattggcaagagatttagctaagaattttaaagatagaaagttaatagaaaaagagcaaaaagaaaatagagctaatttagataagataagagaaaatcttagagaattaatggataaagagcctacagttgtggaagttttaaagtatcgtttatgggagcaacaaagaggagaatgtgcatacactcaaagtcaaattcctttagaaagattatttagtccaggatactgtgaaatagatcatattattccttttagcagatcttttgatgatagtctttcaaataaaattttagtattaggaagtgaaaatcaaagaaagggcaatagaaccccttatgaatattttggagaggattctgaaaggtggaatagttttgaaatatgggttaagggaagctatttaaattataagaagaaagccaatttacttaaaaagaaattttcagaagaggaacaaagggattggaaagcaagaaatttacaagatacaaagtatatatgtagatatatttcaaactttgttaataatagattagaatttaaagaaagtgaaaataagcaaaaggttataactgtaaatggaagagctacagcttatttaagaagtagatggggattaaataaggtaagagaagatggagataaacaccatgctttagatgcagctgttgtaggggttacaactcaagggatggttcaaaaaatatcaaaatatagtaaagcacatgaattatatacagttagaaagaatgacgagtttgtggatgttgaaaccggtgaatgtgtagatgttgatgagtataaagaaataagaaaagatatacttccaagaccatggcgtgggtttagtgaagaattgaaattaagacttagtgataatccattagaagagttgaaaaaatcacctatagagacttataatgaagaatttataaaagaaaatgttaaacctatttttgtttcaagggttccatttagaaaaataagtggaaaactatttaaggaaactatttattcggaaagagcttttaaagatggatattttgtctctaaaaaaagtttagttgatttgaaaaggggggatttagataacttttataattatgagtgcgataagaaactgtatgatgcaataagtgagagaatgaaagagtttaattataatggaaagaaagcttttgagagtccatttagaaaacctactaaaagtggaaaagaagggccagttgttagaagtgtgaaaattaaatcagcagtaccttttaaagatggaattcctatgaatgaaggattagttgctaaggaaggtatggttagaatagatatttatgagaaagaaggaaaatattttgttgttccagtttacagatatcaattagcaaaaggcatagttcctaaaagagcagctatagcaaaaaaagatgaattaaaatggcctattatggatcaaacttataatttcaaattttctatatataagaatgatttaattgaggttaaatatgataaaaagggagtatattttggatattatgatggatttgatagaaatagtgcatcattaacaatagaaaaacatgataattcagaaagatatagaagtatagggctaaaggtaggggtacttgaaattaataaatatgaagtagatgttttaggtaactatcataaagttaagttaggagggaactagat

SEQ ID NO: 21 - DNA, 3210 bp, Neisseria sp.
  source 1..3210: mol_type = unassigned DNA
atgaaaaaacagccgcaacgctatattttgggtttggatttgggtattgcttcagtaggctgggccttgatcttagtggatggagcggaaaatcccgtcggcctgctggattgcggggtacgcacgtttgaacgggcggaagtgccgaaaacaggcgattctttagccttggcccgcaggcaggcgcgcagtgtgcgccgcttaatccgccgccgcgcccaccgtttactgcggttgcgccgcctgctcaagcgcgaaggtattttgagtgctgccgactttaattcagacggactgcctaatctgccgattgatgcttggcagttgcgtgtggcgggcttggagcgaaaactgacaaatcaagagtgggcggcggtattgctgcatttggtcaaacaccgcggttatctgtcgcaacgaaaaagcgaaacccaaacggaaaacaaagaattaggacgtctccttgccggcgtggccgaaaacagcaaactgctgtcagaaagctccgaacaataccgcacgcctgccgaattggcggttaaattatttgcggaacaatcggggcgtttgcgcaataaaggcggtgattacacccacactttcaaccgcttggatttacagaaagagctgcatttgctgttcgagcggcaatgtgcgctcggaaacccgtttgcttcggcagagttgcaaagcaaagttgacgaattactgatgacgcaacgcagtgccttacagggtgaagcagtgttgaaaatgctcggtaaatgcacatttgagccttccgaatacaaagcggctaaaaatacttattctgccgagcggtttatttggctgaccaaactaaacaacctgcggattctgtacaacggcgaagatcgggctttggatgaaggagagcgcaaacaactgttggacgagccgtataaaaaagccaaactaacgtataaacaggtgcgttcaatattgaatctgcctgaaagcgcagtattcaaagggctgcgttacggaaaagattcagacggcctcaaggcggaaaacggcgcattgatggaaatgaaggcctaccacaaaatccgcacagtactggaaaaagcaggtttgaaaggcgaatgggaaaaccgcatccgcaaccccgaaatactggatcagattggtacggcattttcagtatataaaaccgatgaagacattaaagcagagttggccgctttaaggctgcctgaaaacgtgttggatgcgctgctggccggtttgaacttcgataagttcatccaactttcactgaaagccttaagcaatattctgcctttaatggaacgcggcatacgctatgacgaagcctgcaaagaagtttacggcgatcaccgtgccttggcagaatcaaaaaaccaaatgctgctgccacaaattcctgccaacgaaatccgcaatcccgtggtactgcgcacactcacacaagcacgcaaagtgattaacgcgattatccgccgctacggttcgccacaacgggtgcatatcgaaacggcgcgcgagttgggcaaatcgtttaaagaccgaaaggaaatcgaaaaacgtcaggaagaaaaccgcaaagaacgcgaacgtgcggcggaacattttaaagaattgttcccgcgttttaccggagaacctaaaagcggcgatattctgaaactgcgcctgtaccaacagcaacagggcaaatgcctgtattcgggcataccgatagatttaggccgtctgaatgaaaaaggctatgtggaaatcgaccacgccctgccgttttcccgcacgtgggacgacagctttaacaacaaagtgctggtgttgggcagcgaaaaccagaaaaagcgcaaccaaacgccttatgaatatcttgatggtgctcgcgacagccaacgctggcgcgaatttcaggcgagagtacaaggctgtcgttttccttatgctaaaaaacagcgtattcagacggccaaattggacagcaaaaccgaacaaggctttttggaacgcaatctgaacgatacccgttatattgcccgctttttatgcggctttattgaaaaaagcctgcatctgcaaggcgcgggcaaacgacgcgtattcgcctcaaacggccaaatcactgccttgttgcgcggtctgtggggcttgaaaaaagttagggaagacaacgaccgccaccacgcactcgatgctatcgtagtcgcctgctccaccgtttccatgcagcagaaaattaccaaagccatgcagcggcgtgaaaccttggaaacaataaataccgaaaccggcgaagtcaaaacccgcattccgcagccgtgggatttcttccgccaagaagtgatgatacgggtgttcagcgacgccccgcgcgaagagttggcagagaaattaaacagccggcctgaagcgctgcatgattttgtatcgcctttatttgtctcacgcgcccccaaccgcaagatgacagggcaagggcatcttgaaaccgtcaaatccgccaaacgcctgtctgaaaacatcagcgtggtgaaaaaaccgctgacagcgttaaaactgaaggatattgaaaacattgtcggctatcccgaccgcgagcctgctttatatcgagctttgcaggagcgattgcaggcatataaagatgatcctgccaaagcgtttgccgagccgttttacaagcctgcgaaagatggcggacaagggtcattggtcaaagcagtgcggattattgaaaataccaaacatggcttaaaagtacgtaacggcattaccgatactaacggtgatatggttcgggcggatgtctatcaaaaagccgataaaaaagggaaaaggcaatatttcattgttcccgtctatgcttggcaagttgaaaaaaatgagctgccgacagttgattgtaaaggatatgaaattgatgacacttatgaattttgttttagtttatataaatatgacattattgaaattcaaaaccctgataacatgagcaaagaactccgagtttactatatcaattgtgacagctcggatggtagattttggctggcacatcatgataaaagcgctaaagaacagcagttccggatcagtacgcaaaatcagccgatcataaaaaaataccaagtcgacccattgggcaaagaaatccgcttgtgcaaagcagaaaaacgcactgaattgaatggcaaaaagaaaaaataa

SEQ ID NO: 22 - DNA, 3006 bp, Campylobacter coli
  source 1..3006: mol_type = unassigned DNA
atgaaaattttaggttttgatatagggattaactctataggttgggcttttgttgaagataatcaattacaagattgtggcgtgagattgtttaccaaggctgaagaccctaaaacaagagaatctttagctttacctagacgcaatgcaagaagcaatagaagacgactaggaagaagaagatcaagactgattgctttaaagcatattatttcaaaagaattaaaattaaattatcaagattatatagcaaacaatggagaattgcctaaagcttatgaaggaagacttataagtccttatgagctaagatataaagcgcttaatgaaaaaatagaacccaaagatttagcaagagtgattttacacatagcaaaacatcgtggttatatgaataaaaatgaaaaaaaatcaagcgataatgaaaagggtaaaattttaagtgctttaaaaacaaatgctttaaaattggaaaaatatcaaagtgtaggagagtatttttataaagaatttttccaaaaatatagagaaaatacaaaagattttataaatatacgcaataaagaaggcagttatgaaaattgcgttctagcaagtgatttagaaaaagaattaaaactgattttagaaaaacaaaaagaatggggatattcttataatgataattttataaaggagattctaaaagttgcattttttcaaagacctttgaaagatttttcatatttggtaggagcttgcaccttttttgaagatgaaaaaagagcttgcaaaaattcatatagtgcttgggaattcgtagcattaaccaagattatcaatgagctaaaaagcttagagaaagagagtggagagcttgtatcgagtcagattatcaatgaaattttaaatcatgtcttagataaaggaagtatcacttataaaaaatttagagaatacattaaacttcatgaaagtatgaaatttaaaagtctaaagtatgataaggacaatgtagaaagtacaaaactgattgaatttagaaaattagtcgaatttaaaaaagccctaggagagcattccttaagtagggaagaattagatcaaatagcgacttatatcactctaattaaagataatgagaaattaaaaattactttagaaaagtatagtttaaataacgagcaaatcaagaatctgctagaaattgatttcaacgatcatataaatcttagttttaaagcacttaatctaatcttgcctttgatgaaagagggaaaaagatacgatgaagcttgcaagcttttaaatttaaaaacaaaatcaaacaatcaaaaattcgatttcttacctgccttttgcgatagtatttttgcacaagagctcaccaatcctatcgtaaatcgtgctataagcgagtatagaaaagttttaaatgctttgcttaaaaaatatggaaaaatgcataaaattcatatagaattagcaagagatatagggctgagtaaaaagcttagggctaagatcgaaaaagaacaaaaagaaaactatgagaataatatttgggctttaaatgagtgtgaaaattttggacttaaggcaaatgctaaaaacatcttaaaattaaaactttggaaagaacaaaaagaattttgtatttatagcggtaaaaaaatatccatagaacacttaagagatgaaaaagctttagaggttgatcatatatatccttattcgcgaagttttgatgattcttttttaaataaggttttggtttttaccaaagaaaatcaagaaaaactcaataaaacaccttttgaagcctttggagcaaatgaagaaagatggagtaaaattcaagctttagctcaaaatcttccctataaaaagaaaaataaaattttagacgaagcttttaaaggcaagcaacagcaagattttatcagtaggaatttaaatgatacaagatatatttcaactcttattgttaaatacacaaaagaatatttagattttttacctttagatgaaaaagaagatataaatctaaaaagtggagaaaaaggaagtaaaatacatgtgcaaacaatcaatggaatgcttacatcagttttaaggcatacttggggatttgctcaaaaagatagaaacaaccatcttcatcacgcgcttgatgccacgatagttgcttatagcacaaatgccattataaaagctttttcggattttaaaaaagaacaagagcttttaaaagcaaaactttatgctaaagaacttacaaatgatagttataaacatcaagctaagttctttgagccttttgaggggtttagagagcaaattttaaatcaaataaacaaactttttgtttcaaaacctcctagaaaaagagcaagaggagctttgcataaggaaacattttaccctaaagatgaaatgattaaaaaatacaactcacaagaaggtgtagaaatagcactaaattgtggaaaaataagaaaaataggtacaaaatatgtagaaaatgacaccatggtaaggattgatatttttaaaaaacaaaataaattttatgctatacctatttatactatggattttgctttaggagttttaccaaataaaatagtaattgcaggtaaagataaaaagggcaatccaaagcaatggcaagaaatagatgaaagctatgagttttgtttttctttgcataaagatgatttggttttgatacaaaaaaaagatatgcaagaacccgaatttgcttattataatagttttgatatcggtaactcaagtatttgtgttgaaaaacatgataataaatttgaaaacttaacagacaatcaaaagctattgtttgtaaatgcaaaagaaggaagtgtaaaggctgaaaaattaggaattcagggattgaaaatttttgaaaaatacattataaccccgcttggagaaaaaattaaggctgattttaaaccaagggaagatattgccttaaagacgagcaaaaaacatggcatacgatga

SEQ ID NO: 23 - DNA, 3147 bp, Sulfurospirillum sp.
  source 1..3147: mol_type = unassigned DNA
atggttgagaaaattttaggaatcgatttagggattagctcacttggttgggcagtggttgagtacgacaaagataacgatgaaaacaacaaaattattgattgcggtgtaagattatttactgctgctgaaactcccaaagaaaaagaaagccccaataaagctaggcgagacgcaagagggcttcgccgtgtgattaaacgacggcgtgttcgaatgaatactatcaaaaatcttcttataacgtataaactcattgataaaacgctcttagatgaagaaatgggcatgtttcactcccaaagtaaccgtgtcgatgtttggaaactccgccatgatgcactctatcatcttttaagtggcgacgaactggctcgtgtgctgattcacatcgcaaagcatcggggatataaatttttaggcgatgatgaaagcgacgaagagagcggaaaagtcaaaaaagcaggtgctgaactcaagaaaaaatttcttgaagcaggatgccaaagtgtgggtgaatggctttggaaagaaagaggcttgcaaggtaaaaagcgcaataaaagcggtgattacgagatttcaattcctagagactttttggttgaagagattcaacgcatttttgaaacacaacaaaaatttggctctacttttgccacttctgaacttcaaaaagcctataccgacatcgctttttatgtcaaaccgatgcaaagtatcgaagatatggttggttactgcactttttatccaaaaatcaaaagcaaaaatcaagatggagaaaaaagagcacctaaagcttctccatcagccgaacagtttgtaatactaagtaaaattttttcaaccattgttattgatgaaaataaacaagaaaaaaagctaattgaattaaaaagtattgaacaacttattcaaatagctagaagtaaagaaacactcaaatataagcaactgcgaaaagagttaaatcttgcaaaagatatatcgttcaaaagtataagcgatgaggaaaaaacatggataaatcttgtagggaatgcaaaatttaaaaaaattcttggtttgaactatgaaacttttttaaaaaatacagaaatttcagacgagatagcaaaaattttaacctacgataaaacatttgaacaaaaagaaacaaagcttaaaaacttacttgtcaatattgactggatagataacaatcatattgccgaattggctaaattatcttttagtcaattcaaccagctttcacttaaagcaataaaaattatttctaaaatcatgatagaaggctatgcaaggtatgatgaagcagttcaatatgcattcgaaaataacttattgccaaaaccttctcatgaaaaatccatccttttaccacctctcaaagagacaaacatcgccatcttaaacccaaccgtcatccgagcatttgcacaatttcgccaagttgccaatgctttagtctcaaaatatggcagtttcgataaagtgcattttgaacttgcgagagaagtcaatacaaaagaagatagaaagcgctgggaaaaagacagagacaaaaacgaaaaaatgcatcgtcaaattactgaaaaactcgtagaagaaggtgtgaagccaagctacaaaaatatcttaaaatctaaattacgaagtgaacaaaaagacacttgtccttactgtcaaaaaaatttacattaccccatgatttttgaagatggctatgctgaaatagaccatatactccctcttagtcaaagccaagacgacagctatgtcaataaagttcttgttcacagtgcatgcaatcaaaacaaaaagaaccgaacaccgtttgagtggtttcaagatgaaaaaaaagattgggatacctttaaaagctatatcttaatggaatctactttaggggagaaaaaaagaaattacctcataaaagaaaattttagtgacccacaaagtcgaaaagagtttatttcacgcaacctcaacgatactcgttatatgtcaaaagccattaagacttattgcgaaaatcactggaaactctcacacgatgatgacaagcttcgtattcaagtgcgtagtggaaagctaacctcaacacttcgtcatcaatggggattagataataaaaatcgtgaaacgcatacgcatcatgcgatggatgccatcatgatagcgtttagtacgcaaggtatggttaaaaaactcagcgattattttgccaaaaaagaagcaaaagtcgaaaaagataaacccgttctaataactccaataaaacagtttaaagaagctgttgagcaagcaacaacgcttgaacgccaagagagtatccaaacaaaagcgggagataccattacactcaaccgccttcttatcagccgaccacctcgtgctagcgtaacgggagctgcacatgaacaaaccgctaaaccttatccaagaatcaagccaataaaaaataaatacaaaagaaggcggattcctatagacgaagataaatttgagctttttagaaatgataaagtcgctagcggaaatgataaaaatttttacaactcaagcacaattccaagagttgatatatacaagaaagatgataagtatcatgtagttcctatctatctttcagatatgacaaaagcagaagtccccaataaatctttaggtacaaatcctgagggaatggatgaaaaatatttttgctttagtgtattcaaaaatgacctcattgaattagagacaaaagcaacacctaaaaaacctagtaaaaaactcttagggtatttcaaacagcttaatggtgcaaattttatattaaactccatacataatggcataatagatggatttgtatgctctcccataacactttttaaacaacaaaaagacatgtgtaaaaaatgtttaccagaagatagagctatcggtaattgctcgcaagaaactttagagttttgggaagctgaaaatattaaagtacccaaaaaagatttcgagtgcgatcaaggcattaaatttgctattgcggtacgaaaatacaccatcgacccactcggttattaccacgaggtcaaaggagaaaaactcttaggcaccataccacaaggagccaaaaaacacccaaaacgccaaaaataa

SEQ ID NO: 24 - DNA, 3348 bp, Dechloromonas denitrificans
  source 1..3348: mol_type = unassigned DNA
atgagtgcgacatataccatcggattggacattggcatcgcctcggttggctggtgcgccttcggagaaacccacatcctcgacttgggggtgcgggcatttgataaagccgaaaccgccaaggaaggcgaatccctgaatcttgcccgacggaatgcgcgcctgatgcggcgacgtttgttccggcggacgtggcgactgaagaaactagctcgccagctgaaaagcgagggcctcatcgccgacaccaaactgttcaagcctgagctgcctttctcaaaatctctctggcaactacgggtcgatggcctcgaccgccgacttaacgacgaagaatgggcacgcgtcatttaccacctgtgcaagcaccggggttttcactggatcagccgcgccgaagcgaagcaggccgaaggcgacagcaagagcgaagggggtaaggtcaaacaggggctggccggtacggccaagctgatggatgaaaaaggctatcgcagtgcggctgaaatggttctggccgaattcccgcaggcgcagcgcaacaagcaaggcgaataccaaaaagcactttcgcgggaactgctcgccaaggaactggcgttacttttcgcccagcaaagggaatacggcaacctgcatacccccggcgcactggaaacggccatcctcggcaacggcgacaaaaagagcggattgttctggcagcaaaaaccggccctggctggcaccgacctgctcaagatgctcggtacctgcaccttcgagaaaggcgaataccgcgcccccaaagccagcttcaccgccgaacgccatgtctggctgacgcgcctgaacaatctgcgcatcgtcaccgacggcgttacccgccagctcaccgagcaggagcgccaactctgcctgcccttgccctatcggcaggccggcgacttgacctataaacagcttggtagcgcgctcgccaaagccgggctgctggaagccggcggtttcaaattcaccggcctcgcctacccgaccgaggcacaaaaggctgaaggcaaggccaaagacccggaatcggccacattggtcaaaatcccggcctggcatgaactacgacaaacgctcaccaagggcggcctcaacgacgagtgggaaaaactcgcaggggatgccctctgcggtcaaccagagattttcgacaaaatcgcctgggtgttgagcgtatacaaggacgacgacgaagtccgcgccgaactcgccaagctggccctgcccaatccccaggcgctgaccgaagccctgctcaacatccgtttcgacaaattccactccctgtcgctgaaagccttgcgcgccatcgtgccgcacatggagcaaggcctgcgctacgacgaggcctgcgttcaggccggctatcaccacagccagttgctcaaggtcggcgaaggcgaacacaaatatctgccaccgttgtacgacggccgagacggcgatggtcggatgatcttcgccgaggatgccgacattccgcgcaaccccgtcgttctgcgctcgctgaatcaggcacgcaaggtggtcaacgccatcatccggcgctatggctcgccgtcggcggttcatatcgaaatggcccgcgacctgtcccggccattcgatgagcgcaacaagatcaagaaggatcaggacgaataccaggccaggaatcagcgtgacagggaacaattcagcgagctattcggccacccgccgaaaggtcttgagttcgaaaaatggcgcctgtaccgggaacagaacggccaatgcgcctacagccaaaggccgctcaccgcgtcgggcaatgtcgccgaaatcttcctcgatggctcgacggaaatcgaccacgccctgccctactcacgcagtttcgacgacagcaagaacaacaaggttctggtgctgacccgcgaaaaccgcgacaagggcaaccgtaccccctacgagtatttgggcggagccgagaacagcgaaagctggcaacgcttcgtttcgttcgttgaatcgaacaaggcctatcgactggccaagcgcacccggctgctacgcaaggatttcggtgccaaggaatccgaggagtttcgcgaacgcaacctgaacgacacccgctatgtttgccgcttcttcaagaactacgtcgaacagcacctgaaacttgcagagggcagcgagaccaaacgctgtgtcgtcgttagcggccaactgaccaatttcctgcgcgcccgctggggactgctcaaggttcgttccgacagcgaccgccaccacgccctcgatgccgccgttgtcgccgcatgcagccacagcatggttcagcgcctttccaattactcgcgtacccgcgaactagagcaggtgcgcgatggcttcgtcgatatcgaaaccggcgagatcgtcaatccggccatgcaccagcaactgcgcgaacacttccccgacccgtggccctacttccggcacgaactcgaagcccgcctgaagatcgactcgccggaattgttgcgggaggaaatggcgcgtttgggtagctacagcgaagaggaactcaaggtgctgaaaccgctattcgtttcccgcgcaccgcaacgccgcaacggtggcgcagcgcacaaggacaccatctacggtcaaccggaaaaattgaagaaaaacggaagcgttacgcagaaggttgcactcaccagcctgacgttgaaagacatcgacttgctcgccgacccccaccgcaacgcaaagctgtacggggccattcgcgaacgcctcgaagcccacggcggcaagggcgacaaggcatttccggccaccaatccgctacgcaagccggacaaggaaggcaacccgaccggcccgatcgttcgtacggtgaccaaagtcatcgacaaactctccggcatcccggtgcgcggcggcattgccaagaacgacaccatgttgcgggtggatgttttcaccaagggtggcaagtttcatctggtgccggtttatgtgcatcaccgtgtgaccgggctgccgaatcgggcgattatcgcgttcaaggacgaagatgaatggacgctgattgatgacagctttgattggtgtttttcgctgtatccaaacgacctcctacgcatcaagctaaaaaaagaaagccactctgggtattactccagctgcaatcgatcaactggcgcagtaaatctttgggcacatgatcgtaatgtaaatgtgggcaaagatggtttcatcgaaagcatcggcgtcaaaatggctgtttcaatcgaaaaactccacgtcgacaccctgggcaacatctaccccgccccaccggagaagcgtcgtgggctggcgtag

SEQ ID NO: 25 - DNA, 3414 bp, Nitratifractor salsuginis
  source 1..3414: mol_type = unassigned DNA
atggaggatcggatcgtgaaaaaaattctgggcgttgatctgggcattacctcttttggttatgccatcctgcaagagactggaaaagatctatatcgatgtctggataattctgtcgtaatgcgcaacaacccctatgacgaaaagagtggcgaatcgtcccagtcgatacgttcaacccaaaagagcatgcgtcgcctcatagagaaacgcaaaaagcgcatccgatgtgtggcacaaaccatggaacgttatggaattcttgattattcggagacgatgaagatcaacgaccccaaaaacaatcccatcaaaaaccgatggcagctccgtgcggtggatgcctggaagcgtccacttagcccgcaagagctcttcgccatcttcgcccatatggccaaacacaggggatacaaatcgatcgctacggaagatctcatctatgaactggagcttgagctcggtctcaacgacccggaaaaagagtcggagaaaaaagcggatgaacgacgccaagtctataacgctctgcgccatctggaggagctgcgtaaaaaatatggcggagagaccatcgcccagacgatccaccgggccgtagaggcaggtgatcttcgttcctatcgaaaccatgacgattacgaaaagatgatccggcgcgaagatatcgaagaggagatcgagaaggtccttcttcgccaggccgaactgggagccctcggactgcccgaagaacaggtttccgagctcatcgacgagctcaaagcctgtataaccgaccaggagatgcccacaatagatgaatccctttttggcaaatgcaccttttacaaagatgaacttgctgctccggcatacagttatctctacgatctctatcgcctgtacaaaaaacttgccgatttaaacattgacggctatgaagtgacacaggaagaccgggaaaaggttattgaatgggtagaaaagaaaatagcccaagggaaaaatctcaaaaagattacccataaggatctgcgtaaaatcctcggactcgcccctgagcaaaaaattttcggtgtggaagatgagcgtattgtcaaaggcaaaaaagagccccgaaccttcgtcccctttttctttctcgcagatatcgcgaagttcaaagagctttttgccagtatccagaaacatccggatgccttgcagatattcagagaactggccgagatcctccagcgttccaaaaccccgcaggaggccctggatcggctacgtgccttgatggccggaaaagggatcgacacagacgaccgggagctgctggagctcttcaaaaacaaaagatccggaacacgtgaactctcccatagatatatcctcgaagcactgccccttttccttgaagggtatgacgaaaaagaggtccagaggatccttggattcgatgatcgtgaagattactcccgttatcccaaatccctacgccatctacacctacgggaggggaatctctttgaaaaagaggagaatcccatcaacaaccatgctgtcaaatccctcgcctcctgggcgttggggcttattgccgacctgagttggcgttatggccccttcgatgagatcatcctggaaacgacccgggacgccctcccggaaaagatccgcaaggagatcgataaggccatgagagaacgggagaaagctctcgataagatcatcggcaaatacaaaaaagagttcccctccatcgataagcgtttggcaaggaagatccagctctgggagcgccaaaaaggactcgatctctacagcggaaaggtcatcaacctttcccagcttctcgatggtagcgccgatatcgaacatatcgttccccaaagcctgggcggtctgagcacagactacaataccatcgtcacgctcaaaagtgttaatgcggccaaaggcaaccggctccccggcgactggctcgccggaaatcccgactatcgggaacggatcgggatgctctctgagaaggggttgatcgactggaaaaagcgaaaaaacctccttgcccaatccctcgacgagatttacaccgaaaatacccatagcaaggggatccgcgccaccagctatctcgaagctttagtcgcccaggttctcaaacgttactatccttttccggatcctgagctgagaaagaacggcataggggtccgaatgatccccggcaaggtcaccagtaagacacggtctctccttgggatcaaatccaaaagccgggagaccaatttccaccacgccgaagatgccctcatcctctcgaccctcaccaggggctggcagaaccgcctccatcggatgctgcgagacaattacggcaaaagcgaagcggagctcaaggaactctggaaaaaatacatgcctcacatcgaggggctcaccctggccgactatatcgacgaagcgtttcgccgcttcatgtccaaaggggaagaaagcctcttttacagagacatgttcgacacgatccgcagtatctcctactgggtggacaagaaacccctctccgcctcctcccataaagagaccgtctattcatcccgccatgaagtccctactttgcgtaaaaatatcctcgaggcttttgacagcctcaatgtcatcaaagaccgccataagctcacgacagaggagtttatgaaacgttatgataaggagatccgtcaaaagctatggctgcatcgtatcggcaataccaacgacgagagctaccgtgccgtagaggaacgggcgactcaaatcgcccagatactcacccgttatcagctcatggatgcccagaacgacaaggagatcgatgagaagtttcagcaggcgctcaaagagctcattacctcccccatcgaagtgaccggaaaactgttgaggaaaatgcgtttcgtttacgacaagctcaatgctatgcagatcgaccgggggctggtagagacagacaaaaatatgctgggtatccatatctccaagggccccaatgagaagctcatcttccgtcgcatggatgtcaacaacgcccatgaactccaaaaagagaggtccgggatactctgctatctcaatgagatgctttttattttcaacaaaaaaggcttgatacattatggttgtctgagaagctatctggagaaaggtcaaggttccaaatatattgcactattcaacccgcgattcccagccaatcccaaagcccaaccctcaaaatttacttcagacagtaaaatcaaacaggtaggtatcggcagcgctacaggaatcatcaaggcccatctcgatctcgacgggcatgtcaggagttatgaggttttcggcaccctgcccgaagggtccatagagtggttcaaagaggagtcgggctatggccgcgtggaagacgatccgcatcactaa

SEQ ID NO: 26 - DNA, 3405 bp, Enterococcus cecorum
  source 1..3405: mol_type = unassigned DNA
atgaaatatatagaaagcgtttcgattgggtttgatattggcgtgggatctgttggttatgctgttattaattctaaaacgaaacaaattttagaaagcggtgtaagtatttttcccgcagcagttgcacaaaagaatgttgaacgtcgtgagtctcgtcaatcaagacgtttgagaagaagacgagtcaatcgcttaaatgatttgaaaaaattactgaaaaaaaacggctttatcccatctcctaataaaaatccttatgaaattcgtgttagaggactagagcatcaattgagtagagatgagattgcgattgcggtgctacatattgcaaaacgtagaggtataagttattcattagatgatgttgtagacgagaatgttactgattttaaggggaaaattgcgaaaaatcaagaagcactaaagaataagacacctggtgagatacaatatgaacgtttgttaaaatacggtaaagttagaggtacagtcaccaattatgttgaatatgatgaacagccagagtattttttaaatgtatttcctaatagtgcttatgttgatgaagcaaaaagaatcttaacttgccaaaaacagtattatcctgaaattactgatgatttaatcgaaaatattgtcaaaattattagtcgtaaacgagcttattatattggtccgggtaatgaaaaatctagaactgattatggaatctatcgtacaaatggtgaaacgttagaaaatattttcgaaatccttattggtaaagatagtgttaatccagatgagctacgtgcaccagcaaactccttgactgcacaggtttataatttattaaacgatttaacgaatattcggtataatggatcggaaagattaactcccgaacaaaaacaagatattttatctgaattacttactacagaaaaaacagtacagatgctaaatgttattgctaaaaaagtaaatgtgaagaaggaagaaatttcaggattccgtaccaaaaaagatgataaacctgattttcatacattagaagtatatcgaaaagttcgaaaacatatgctaaataaaggaatcgatataaatgaatggccaacagaatgctttgatgagttagctttcattttcaatttaaatactgaaattggtgaaattagaaatcgtatttctgaaaaagtggtacctaaatatgattttatcactaatcaaattgttgatgatttacttgaagatcctaaaatttttgctatttcaacatcacaaaaatggcatcgtttttcaattaaaacaatgaatgtcttaatacctgaattattaaatggttataatgaacaaatgactattctaacaaggatgggattactggaagatagtaagaatgattactcaaacattgataaaattgatattaaaaatgtaactgaaaatatttataatccagtagtgcgaaaatcaattaaaaaatgtttgaaaatctttaatgaactttataaaaaatacccaaatatttcagatgttgttattgaattaccgcgagaagataatcccgaagatgcaagaaaattaattaagaagatgcaaaaagaaaatcttgttgaaaaagatacatcattagaagcattcagaaaagaagcaaatttatcagaaaatggattaattgattttttaagaaaagggaaaaatcgcgcattaaagattcgtttatggtatcaacaagaaggaaaatgcttatatacaggtgaaccaatattagcagaggatttatgtaaaaatgaagcaaattacgatattgatcacattattccaatttcggtatcatttgatgacagtataaataataaagtcttatgttctagtcattttaaccgatttgaaaaagagaagaaaacgccgtttgaatattttagtaataaatcaagtcatttagggcgttatagtaattttgatgagtttagagctagtgttaatgcgaataaacgaattagtgatgttaaacgtaagaatttactgtcaaaagaattgttgtctgatctagatactcgtaaaaaatttattgcacgtaacttggtagatactagatatgcttcaagagttgtatttaatgaattgacacaattttttgcatccaagaaagctgatactaaggtggccgtaattcgtgggaaattcacttcgcaactaagacgtgcatggcaattaaataaatcaagggatacctatcatcatcatgcagttgatgctgctttaattggtgtaactcctttcttgaaaatttggcgctcagggaaaacgatatatccgcgtaaaatgactgaagcacaaactgattttgaattaaatgaaataactacaaatgatgaatttaaagaaagttattatcaactaccttgtccacaatttttagattatctaactcaaatgcaagaaaatctaaaaattaattttgaagttgataaaaaaatgaaccgtaaaatcagcgatgcaatgatttactcatctcgaaaaaagaaattgagtaaggataagaaagaaaaagaatattccttagggacaattaatgatatttattctgatgctggatatagtaaatttaagaatatctataagaaagataaggaaaaatttttaatgtatcatttggatcataagagttttgaaattttagaagatataatttctcaatatcctgacaaagaggaatatatcgattctgagggaaaggtgaaacaaagagcagtaagcccttttgaaatttatcgtcgtaaatatggatatattcgaaagtatagcaagaaaaataacggtccaattataaaaaatatgaaatattataatgagaacttacctaaaatatatatagatattactccaaaacaatcaattgataaaaaagtatatcttactaatatatcgccttggcgaacagatgtttactataatcgttctcaaaattcatatcatattatgggaataaagtattctgatttgaggtatattgatggcaagtatggaataccgaagaatgtgtacgaaaaaataaaattaagagaaaaaattcctagtgaatcagaattttgtttttcactttataaaaatgatagggttaaaatcattgatccaaataaaaacgaggaaatcgagttaagatttaattctagaacactaccttcagtgctaaactatgttgaatttaaaccattatttcaagaatcttataatagtttgacgcttcttccagtgttttcaaagactaccagtgaaggaagaataataaaaaaatttactagagaagataatatcgtttacaaagtaaatactgacgaactaggcaatccatattatattttaaaagaatcacaaaatcccaaaaatattattgacaactctaataagacggagtag

SEQ ID NO: 27 - DNA, 3429 bp, Facklamia hominis
  source 1..3429: mol_type = unassigned DNA
atgtattctgttgggttagatattggtatagccagctgtgggtatagtatcattaacgatgtcaatggaaatattgtagaactcggcacccttctctttaagtcgcgaaatagtgataataatgaggagagaagaactaataggggttcaaggcgattaattaacagacgacgaactcggcttgatgatggtaaaaaattgttagcagaaaaaggatttaaacaagattccaaattaaaacatgtatgtccttatgaacttcgtgttaaggggttacatgaaaaattaacacagggggagatttataaagtagttctacatattctcaaaaaaaggggaattagttatttagatgaatcggatgaaaattcatctggaattgacggtgctagttataaagatcaagtaaatctaaatttaaatttgcaaaaggaattaactccaggtcaaattcaattaaaacgtttgaaggaaaatggtcgcataaaatcaggcgttacttttgaaaatggatatcaattaaatgtgttttctgtaagtgcttatgctaatgaattaaataagatattaacaaagcaatcagaatattattctgaaattgaccaaatttggatcgatcgtttcactaaaaatggttatcgtaaagaagcaggcctagtttatagaaaaagaccttattatgatggcccaggaaatgaaaagaacaactcaatttatgggcggtgggcaaattttaaagaggatggacaccctaaggagaatatatttgatcaattaattggattagactcagtggattcaacacaagtaagagccagtgcgtctactttgacagcacagaaatataatctattgaatgatctaaataacttaacaattatagaagatgatcgtaagtttacaacagatgaaaaagtttctattattaattatttaatgactcaagatataactcggtttggccccaaagaattagctaagttttatcaattagaagtggatcaaattagagggtggcgaattgacaataaagggaacccagaaatccattcattgaaggtatatagagattggaaaaaaatatttaatacatctagtattgatctaactagtattcaaacttgggtagttgatgagctggctaatgttattactttgaatacggaaattccatcaacattagctacattaaagataaagatacctgatatagatcagcagatattaaattttgttgagaataatttttatgaattaaagaaaaaaacaagtaaaaattcttggcatagcttttcgcttaaaaccctcaatattttaataccagaattgttaaatacttctgaagagcagaatactatattagaacgtttaaatctaaagttcgatttaaaaaataaatatgcagaaaaaaatcaaatacctgttaaggagcttctagaacaaatttataatcctacagtaaccaaatctgttcatcaatcaattaagttatttaatgaaattatagaaaaatatggaaaaaataatatatcttatgtaacgatcgaaatgccaagagataaaaacgatcaggatcaaaaagatactataaaaagaataaataaattaaatagtgaacgaaagaatgatagtgaaaaatattttttagaaagatcaggttgggatactattcgatttgagagtgcgttaaaaaaaccacgctttgcagagaagctactgttttattatgaacaaaaaggcaaatgtgcgtatagcggtcaggatattctggcagaatctttattgaatgaatcttgtgaagttgatcatattattccgttatcaataagttttgacgattcgatccataacaaagtgttagttactgcaagctctaatcaagaaaaaggacagagaacaccctatatggcattcattgatggagcgaagttggggcaaagttgggatgactttgtcgcttgggtaaactcatgtggattccatcgaaaaaaggttcaaaatttactttatgaggagaatatttttaacccagatgtgcaaaggggatttgttagtcgtaatttaaacgatactagatatgccagccgaattgtgttaaatgctatacaaagcttcttttataaacagaaagatttgaccaaagttaaagttgtgaatgggagttttacacatactctaaggaaaaaatgggggagtagcttagataaaaatcgggatacataccatcaccatgcggttgatgctactttgtgtgcagtaacgccttttattaatatagtaaaatatgagttttttgaagaagatggaataaaatatatggttgatttaaccacgggagaaaaagttgcatatagtgattataaaaaaatgaagttttatgataaaagggcatatgtccccatttgggatgggtttattaagcagttaacacctgcaaatttatatccaaagattaagttttctcatcaagttgattccaaatggaacagaaaaattagtgatgcgacgatctattctacaagaaaaattgtagagaccaagattaataaaaaaggagtcgctaaagaaactgtaaaagatatagtcattgataaaataaaagacatatatactcctgaggggtggaggaaatttaaagagaaacaagataaacttcttatgaagaactttgatgaaaaaacttataataagttaataaagatagcaaaagaatatccagaaaaaaaagaagttcaaacatcaaatgggaaagtaagtcttgttgaggtttcaccatttaaaatgtattgcgaagaacagaatgttcctgcaatacgaaagtattctaaaaagggcaatgggccttatattcgttctttaaagttttacgataaggaactagggaagcatattaatattacaaaagattcttatggaaatgatattgagcgaacaatcagaaataaaaagatcattttaaaaaatcaaaactcctggagaactgatgtttactataattctgtaaataattgttatgaattattgggtattaagtactgtcaccttaaattttaccgaggaaaatatggtataccaaaatcgatctatgatgaattaaagaaagaagatgagatttcctcagaaagtgtttttaaatttagtctgtatagacatgatagagttcgattcgaaaaagatggtgagtatattgaagctttatttggatcaaaaaatgaatcgaataaaaattatttagaactgagtccaattgacaaaaataaatggttatcaaaagagaatgttaagttttttggagaggtggctgcatcaggacgatttataaaagggctaaagcctggtattaaagtgataaaacagtcgacagattatatgggacatgtatacgccattcatcaggaaaaattaaaatttgttttgtcggatgcttga

SEQ ID NO: 28 - DNA, 3369 bp, Streptococcus sinensis
  source 1..3369: mol_type = unassigned DNA
atgaacggaaaaattttaggattagatatcggtgtggcttccgtcggtgtcggaatcttagacaaaaaaactggtgaaattattcatgctagttcacggattttcccagcggctactgctgacagcaatgtagagagacgaggttttcgccaaggacggagactaggacgcagaaaaaagcatcgaaaagttcgcctagctgacttgtttagtgatacgggtcttataacagatttttcaaaagtatccatcaatttaaatccatatgaactgcgcattaagggattaaatgagaaattaactaatgaagaattattcattgctttgaaaaatattgtcaaaaggagagggattagttatcttgacgatgctaatgaagatggtgagtcttcttcctcagagtatggcaaggctgttgaagaaaatagaaagctgctcgcagataaaacaccgggacagattcagctggaacgttttgagaaatacggacaggttcgaggtgattttactattgaagaaaatggggaaaaacaccgtctgcttaatgtgttttctacctcagcttataaaaaagaagcagagcgaatcttgacaaagcagcaagactataatcaagatatcactgatgaatttattcaggcatatttaacgattttaactggaaaacgtaagtattaccatggaccagggaatgaaaagtctcgtacggattatggacgcttcagaacagatggaacaactttggataatatttttggtattttgattgggaaatgtaccttttatccagaggaatacagagctgctaaagcttcttacacggcacaggaatttaatttactcaatgatttgaacaatctgactgttccaacagaaactaagaagcttagtgaggagcagaagagacaaattattgagtatgcaaaaggagctaaaactttaggtgctgctactttgttgaagtatatagcaaaattggtcgacggatctgtagaggacataaagggatatcggattgataaaagtgaaaaaccagaaatgcatacttttgatatttatcgaaaaatgcaaacattggaaacggtcgatgttgagaaactatctagagaagttttagatgagttggctcatatcctcacactcaatacggaacgtgaaggaatcgaagaagcgattaaagtatcatttatcaaaagagaatttgagcaagatcagattgctgaattagtttcatttagaaagtctaatagttccttgtttggaaaaggctggcataatttttcaatcaaattgatgacggaattgattccagagctgtatgaaacatctgaagagcaaatgacaatccttacacgattgggaaaacaaaaaacaaaggcaagatctaaacgaaccaagtatattgatgagaaggaattgaccgacgaaatttataatccagtagttgctaaatcagtcagacaagcaattaaaatcattaatcttgctacaaagaaatatggtgtctttgataatatcgttattgaaatggcgcgtgaaaataatgaagaggatgcaaagaaagactatgtgaagcgtcaaaaagccaatgaagatgagaaaaatgctgcaatggaaaaagcagctcatcaatataatggaaaaaaagaactaccagataatgtctttcacgggcataaggaattggcgacaaagattcgactctggcatcagcagggagaaaaatgtttatatactggaaaaaatattccaatcagcgatttaattcacaatcaatataaatatgagattgatcatattttgccactatctctttcatttgatgatagtttagcaaataaggtactagttttagcaacagccaatcaagagaaaggacagcgcacaccattccaagctctggatagtatggatgatgcatggtcttatcgagaatttaaagcttatgtgagaggagccagggcactcagtaataaaaagaaagattacttgctgaatgaggaagacattaacaaaattgaagttaaacaaaaatttattgagcgtaatctagttgatactcgctattcttctcgagtagttttaaatgctcttcaggatttttataaattaaatgattttgataccaagatttcagtggtgcgtggacaatttacttctcaacttagaagaaagtggcggattgacaaatcgcgtgaaacttatcaccatcatgcagtcgatgcattaattatcgcggcttccagccaattaagactttggaaaaagcagggtaatcctctaatttcgtacaaggaaaaccaatttgtggattctgaaacaggggagattatttcattgactgacgatgagtacaaagaattggtatttagagctccttatgatcattttgttgatacggtaagcagtaaaaaattcgaagatcgtattttattttcctatcaagtggattcaaaatataatcgtaagatttctgatgcaacaatttattccacaagaaaagcaaagttgggtaaagataagtcggaggaaacctatgtattgggtaagattaaggacatatatactcaaacgggctatgacgctttcataaagctttataaaaaggataaaagtaaattcctgatgtaccataaggatccaataacctttgaaaaagtcattgaggagattttaaaaacttatcctgataaggagataaatgaaaaaggaaaagaagttgcttgcaatccctttgagaaatatagacaggaaaatggtcctcttcgaaaatatagtaaaaaaggaaaaggtccggaaatcaagagtctgaaatactatgataacaaattaggaaatcatatagatattaccccagataatagtgagaatcaggttatattacaatctttaaaaccctggcgtacggatgtctattttaatcataagacgaaaatatatgaattgatgggattaaaatattcagatttatcttttgaaaaaggaagtggaaaatatagaatatctttagataagtataatgttattaaaaagaaagaaggtgtacacaaggaatcagaatttaaatttacactctataagaatgatttgattttaataaaagatttagaaaagagcgaacaacaattattccgttataattcaagaaacgatacatcgaaacactatgttgaattgaaaccctatgataaagctaaatttgaggggaatcagcctctaatggccttatttgggaatgttgctaaaggaggacagtgcttgaaaggtttaaacaaagcgaatatctccatctacaaagttcaaacagatgttttagggaataaacgttttatcaaaaaagagggtgatgctccaaaactcgaattttaa

SEQ ID NO: 29 - DNA, 3276 bp, unidentified
  source 1..3276: mol_type = unassigned DNA; note = eubacterium dolichum
atgggcagattagtattgggattagatattggtattacttcggttggatttggaattattgatttagatgaaagtgaaattgtagattatggtgttcgtttatttaaagaagggacagctgctgaaaatgaaacaagacgtactaagcgtggcggcagaagattaaaacgaagaagggttactaggcgagaggatatgttgcatttgttgaaacaagctggtattatttcaacttcttttcaccctttaaataatccttatgatgtacgtgtcaaaggactgaatgaaaggttaaacggagaagaattagccacagctttattgcatctttgtaaacatagaggaagtagtgttgaaacgattgaagatgatgaagcaaaagctaaggaagcaggagaaacgaaaaaagttttgtctatgaatgatcaacttctgaaatccggcaagtatgtttgcgagattcaaaaagagcgattgcgtacaaatggtcatattagagggcatgaaaacaactttaagacaagggcgtatgttgatgaagcttttcaaatacttagtcatcaggatttatctaatgaactgaagtcagcgattataactatcatatcacggaaaagaatgtattatgatgggccgggaggtccactatctccaacaccttatggacgctatacatattttggacaaaaagaaccgattgatttaattgaaaaaatgcgtggtaaatgtagtttatttcctaatgagccacgtgcacctaagcttgcatatagtgctgagttatttaatttgttgaacgatttaaataatttatctattgagggagaaaagctaacatcagaacaaaaagccatgattttgaaaattgttcatgaaaaaggaaaaattactccgaaacaattggcgaaagaggttggcgtatcgttggagcaaattcgtgggtttagaattgatacgaagggaagtccattattatctgaattgaccggttataaaatgatacgtgaagtcttggaaaaaagtaatgatgaacatttggaggatcatgtattttatgatgagattgctgagattttgacaaagacgaaagatatagaaggaagaaaaaagcaaataagcgaattatcttctgatttgaatgaagagagtgttcatcaactagcaggcttaactaaatttactgcgtatcattcactatcttttaaagcattgcgattgattaatgaagaaatgctaaaaacagaattgaatcaaatgcagagcatcacattattcggtttaaaacaaaataatgaactatctgtaaagggaatgaaaaatatccaagcagatgatactgctattttaagtccggttgcgaaacgggcacaacgtgaaacctttaaggtagttaatcgcttgcgtgaaatttatggtgaatttgatagtatcgttgtagaaatggcacgtgaaaaaaacagtgaagaacaaagaaaagcaattcgtgaaagacaaaaattctttgaaatgcgtaacaaacaagtagcagatattatcggagatgatcgtaagatcaatgctaaacttagagaaaaattggttctatatcaagaacaagatggtaaaacagcgtattcgttagagcctattgatttaaaactattgattgatgatccaaatgcttatgaagtggatcatatcattccgatttctatttctttagatgattctataacaaataaagttttagttacacatcgtgaaaatcaagaaaagggtaatttgacaccaatttcagctttcgtaaagggaagattcacaaaaggatccttggcgcaatacaaagcatattgtttaaagctgaaagaaaagaatataaaaacaaacaagggatatcgaaagaaagttgaacaatacttgttgaatgagaatgatatttacaagtatgatattcaaaaagaatttatcaatcgtaatcttgtagatacaagttatgcaagcagagtggttttgaatacattgactacttactttaaacaaaatgaaattcctactaaagtatttacagtcaaaggttctttaacaaatgcatttagacgaaagatcaatttgaaaaaggatcgtgatgaggattacggacatcatgcgattgatgcattgattattgcatcaatgccaaagatgcgcttgttaagtacgattttctcacgttataaaattgaagatatttatgacgaaagcaccggagaagtattttcatcaggtgatgacagcatgtattatgatgatcggtattttgcctttatcgcaagcttaaaagctattaaagtaaggaagttctcacataaaattgatacaaaacctaatcgcagcgtcgcagatgaaacaatttacagtacacgtgtgatagatggtaaagaaaaagttgtgaagaaatataaagatatctatgatcctaaattcacagcgttagctgaggatattttgaataatgcctatcaagaaaagtatttgatggcgttacacgatccacaaacatttgatcaaatcgttaaagtggtcaattattattttgaagaaatgtcaaagtcagagaaatactttactaaggataaaaaggggcgcattaaaatttctggaatgaatcctttgtctttgtatcgtgatgagcatggtatgctgaaaaagtattctaagaaaggagatgggcctgcaattacacaaatgaaatattttgatggtgtattaggaaatcatattgatatttcggctcattatcaagtaagagataaaaaagttgttttgcaacaaatttccccatatcgaacagacttttattattctaaggaaaatggatataaatttgttactatccgttataaagatgtaagatggagcgagaaaaagaaaaagtatgttattgaccaacaagactatgcgatgaaaaaagcagagaagaaaattgatgatacatacgaattccaattttccatgcatcgtgatgaacttatcggaattaccaaagcagaaggagaagcgcttatttatccagatgaaacttggcataactttaacttcttttttcacgctggagagactccggaaattttgaagtttacggcaacgaataatgataaaagtaataaaattgaagtaaaaccgatacattgttattgtaaaatgcggttaatgccaactattagtaagaagattgtacgcatagataaatacgctactgatgtagtaggaaatttatataaagtaaagaaaaataccttgaaatttgaatttgactag

SEQ ID NO: 30 - DNA, 3393 bp, Streptococcus macedonicus
  source 1..3393: mol_type = unassigned DNA
atgacaaatggaaaaattttaggtttggatattggtattgcatctgttggtgttggtattattgaagcgaaaactggtaaagtagtccatgctaattcacgtcttttttctgctgcaaatgcagaaaataatgcagagcgaagaggattccgtggctcaagacgcttaaatcgtcgtaaaaaacaccgtgttaaacgagttcgtgatttatttgagaaatatgggattgttactgattttagaaatttgaacttaaatccttatgaacttcgtgtaaaagggttaacagaacaacttacaaatgaagagctatttgctgctttacgaacaatctcaaaaagacgagggatttcatacttagatgatgcagaagacgattcaactggtagtactgactatgcaaaatctattgatgaaaaccgtcgcttgctaaaaaccaaaactcctggtcaaattcaattggaacgtttggaaaaatatggtcagttacgaggcaattttactgtttatgatgaaaatggtgaggctcatcgattaatcaatgttttttcaacttctgattatgaaaaagaggcacgtaaaattttagaaactcaagcggattacaataaaaaaattactgctgagtttattgatgattatgttgaaatcttgactcaaaaaagaaaatattaccatggaccaggtaatgaaaaatctcgtacagattatggacgttttcgcacagatggcacaacgctcgaaaatatttttggcattttaattggtaaatgtagtttttatcctgatgagtatcgtgcctcaaaagcttcttatactgcacaagaatataactttttaaatgatttaaacaatttaaaagttccaacagaaactggtaaattatctactgaacaaaaggaagctttagttgaatttgctaaaagtactgcaacgttaggtcctgctaaattattaaaagaaattgctaaaatactagattgtaaagttgatgaaattaaaggatatcgtgaagatgataaaggcaaaccagacttacatacatttgagccttatcgaaaattaaaattcaacttagattcagttaacattgattatttatcaagagaagtccttgacaaattagctggtattttaacacttaatacagaacgcgaaggtattgaagatgccatcaagcgtaatttgccaaatcagtttactgaagaacaaatctctgaaatcattaatgttaggaaaagtcaaagcacagctttcaataaaggttggcatagtttttcagctaaactaatgaatgaattaattcctgaattgtatgctacatctgatgagcagatgacaattctaacaagattagagaaattcaaagttaagaaaaaatcatcaaaaaatataaaaactattgatgaaaaagaaatcacagatgaaatttataatccagttgtagctaaatctgttcgacaaacaataaagattattaacgcagcggttaaaaaatatggtgattttgataagattgttattgaaatgccacgtgataagaatgctgatgatgagaagaaatttattaataaaaggaataaggaaaataagaaagaaaaagatgacgctttaaaacgtgcagcttatctttataatggtactgataaattacctgatgaggtctttcatggaaataaacagttagaaacaaaaattcgactttggtatcaacaaggtgaacgttgtttgtattctggcaaaccaattccaattcaagagttagtacataattcaaataattttgaaattgatcatattttacctctgtcgctttcttttgatgatagtttagcaaataaagtattagtttattcttggacaaatcaagaaaaaggacaaaaaactccttatcaagtaattgattctatggatgcagcatggtcatttagagaaatgaaagagtatgtcttaaagcaaaaaggacttggaaagaaaaagcgtgactatcttttaacaacagagaatatcgataaaattgaagttaagaagaaatttattgagcgtaatttagtagatactcgatacgcatcacgcgttgtccttaatagtcttcaatctgcattaagagagttgggcaaagatactaaagtttctgttgttagaggtcaattcacctcacaactacgtcgaaaatggaagattgataaatcgcgtgaaacataccatcatcacgctgttgatgctttgattatcgctgcttccagtcaattgaaattgtgggaaaaacaagacaatccaatgtttgtggattatggaaataatcaagttgttgataaacaaacaggggaaattttgtccgtttctgataatgaatacaaagaattggtattccaaccaccatatcaaggttttgttaacacgatttcaagtaaaggatttgaggacgaaattttgttctcttatcaagttgattcaaaatataatcgtaaggtttctgatgcaactatctattcaacacgaaaagctaaaattggaaaagataaaaaagaagaaacttatgttttagggaaaatcaaagatatttacagtcaaaatggatttgatacctttgttaagaaatataacaaagataagacacaattcttaatgtatcaaaaagatcctttaacatgggaaaatgtcattgaggtgattcttggagactatccaactacaaaaaaatctgaagatgggaaaaatgatgtcaaatgtaatccatttgaagaatatcgtagagaaaacggcttaatctgcaaatacagcaaaaaaggaaaaggcacaccgattaaatctcttaagtactatgataaaaaattaggaaattgtattgatataacacctgaggaaagcagaaataaagttattttacaatcaattaatccttggagggcagacgtttactttaatccagagactttaaaatatgaactgatgggattaaaatattctgatttaagttttgaaaaaggaactggtaattatcatatttcacaagaaaaatatgatgcgataaaggaaaaagaaggcattggtaaaaaatctgaatttaagtttactctttaccgaaatgatttgattttgataaaagatatagctagtggcgaacaagaaatttatcgctttttatctcgaacaatgccaaatgtaaatcattatgtggaattgaaaccatatgataaagagaaatttgataatgttcaagaattagttgaagctttgggagaagcagataaagttggacgttgtataaaaggtttaaataaacccaacatctcaatatataaggttcgcacagatgttcttggtaataagtattttgttaaaaaagaaggtgacaaacctaaattggattttaaaaataataaaaaataa

SEQ ID NO: 31 - DNA, 3324 bp, Turicibacter sp.
  source 1..3324: mol_type = unassigned DNA
atgggatatacactaggcttagatattgggattgcatcagttggatttggtttaattgacaatgttgatgggaaaattttagaatcaggagttcgtttgttttcttctgctgatcctgataataatcaaacacggcgtagctccagacaggctagacgtcttaatcgtcgaaaggtgcatcgtttagaacgagttgcgcacttgttagaagaggctggttttgaaaaaggagaggttttagctcctacgccttatcatttacgagtaaaaggattaacggaaaagttaagtaagccagaagtttatgctgctttatataatttaatgaaacatcgaggaatttcttatttagaagatgttgagttagatgaggcagatagtagctctgtgagccaaaatgttgagttattaaaagagtattatccatgtgaaatccagttagaacgttatgaagaatatggccaaattcgagggattattgaaacttataataaagatggtgaaaaagagtcattggttaatatttttccaactggtgcttataaaaaggaagctgaggcaatcatcttaaaacaaggtcagttttatcctgagttagataaagtgtttttagaaaaattcacggaaattttaacagttaagcgcccttattatgtagggccaggcaacaaaaagtcacgtactgattatggaatctatcgtgaaaatggagaaactctagagaatttatttgatattttaattggaaaatgtacgatttatccacaagaggcacgtgctgctaaattttcttatacagcccaattgtttgactttttaaatgacatgaataatatttctattgctggtgagaagttaacggaagttcaaaaacgtgaaatttatcatcagattatgtcatcaaaaacagtgaatatgatgaagattataacgaaagttacaggttgcctaaaagaagaagtgacggggtacagggtagatagtaaatataaagccgaatttcattcatttgctagttatcgtcaatttagaaacaaaatgttagattatggttttgatgttcaaacgttaaatgttgaaatgtttgataaattggcggctaaactaacattaaatacagaatatcatcaaattattactcagttggaatcgcttaatttaggattaagcaaagagttaattgaaaaaatagctgattttagaaagaaaaacaggtctcttttctctaagtggcacagtttatctttgaaagctatgaatgaagttgtagatgaattgtggtcaacatctaaaaatcagatgcagatatttagtgaattagggggttttaaatcaaatatagaagtttttaaaggactgaaatatattcctttagacgcaatggtcgatgaaatttataatcctgtcgttagatgttccatccgtgaaagtataaagattattaatgccttactaaaaaaatatggggctttagataaagtagttattgaaatgcctcgtgatagtaatgaaaaagaagaaaaagatcgtattacaaaattaaataaagaaaatgataataagaagaaacaggccattgagaaagcgagaaatgaatatggatttggggaagaagcttatcgtcagcagaatgatttaaatacaaagttgcgtttatggtatgaacaaaaacaaagatgtttatatagtggagaaataattaaaatatttgatttaattaaaaatccacatttatttgatattgatcatattattcctaaatcaatttcttatgatgatagtttatcaaataaagttttatgttatgcgactgaaaatcgtgaaaaaggaaatttaacaccgtatcgttattttaaaagaaaagcgagtttaacttggaactatgaggcttataaaagttatgttattgaattatacaaagatggaaaaggtgatcttagtcgcaccaaactagaattattgctttttgaagaggatattaataagtatgaagttcgtcaacggtttattaatcgtaacttagttgacactcgttatgcctcaaaggttgtcttaaatactttacaagattttatgaaagaaaattatcctactacaactgtagaagttgttcgaggaaagtttactgctcagttaagaagacactggggaattagaaaaaatcgtgatgaaaatcatgcacatcatgcgattgatgccttaattattgcttgtgtaccacatttatcattatggaaagaacaaaagaaggtatttagtacagatgaatttagagttgatgaaacaactggcgaaattatcgaacaaagttataatcaacttacatatcaggaaccatttagtcaatttttctatcaacttgaaaaagtatcgattgattgtcgttactcatataaagtagatcggaaatttaatcgtcaagttgcggatgcaactatttattctacaagacaggggatagtcaaacaaacgagcggtgacaaaagttttactcttgattcaaatagtaaagagcattatgttatcgcaaaaattaaaaatatttacgaagatgtagatgctaaacgatttatggatcgatataaaaaagataaaactcaatttttaatgtatcatcatgatcctcaaacattttctattttagaggatgtgatgaaaacttatcctgataaaaagaatccatttcaagcctatcgattagagtatggaccaattagaaagtatagtaaaaaaggaaatggacctcagattcaaagtattaaatattatgattcaaaattaggacaacatattgaattaaaacaagcaaatcaaagtactaaaaaagttgttttgcagtcgttaaatccatggcgttgtgatatttattataataagaaagacaaaagatatattgcagcagggttaaaatatgctgatttgtcatatcaaaaaggaacaggactatatggtatttcacttcaaagatatcaacaaattttgaattctgagaaaatcgaattaagtatagaacaaattgaattattattggagggaagactaaacgaatcaaattttgagttttgtttttcactttataaaaatgattttattcaatggaatgatgagaataatcaaacctttcagtatcgattcttagctcgtaatttgagtagccctaatcgaatagaggtaaaaccaattaataagtcaaaatatgataaacaagctgaaggtttgaaaacgttaaagaaaggactaaataggttctataagatctcagttgatgtattgggatatcaacattttattaaaaaggaaaaattaaaattaacgttcaaataa

SEQ ID NO: 32 - DNA, 3195 bp, Bacillus niameyensis
  source 1..3195: mol_type = unassigned DNA
gtggaaaaattgagaagggtgttggggcttgatattggtgtttcttccgtcggatgggggatcattgaccaagacagtggagatgtcattgacgctggggtaagactgtttgaagaggctgcacgtaatgctaatgaggatcggcgaagttttcgtagttcgcgcagattgaagaggcggaggacacaccgtttggaaagagcaaaaagtcttttcgagtacaatggattaccttctgaatcaattgggaaaatggatccataccaagctaggtataacgctatttttggagaggtatctaaagaagaattagttgcagggttataccacttagtaaaaagaagaggaacaacgcttgactcacccgaagatgaaaaatcgagcggcaatgaactatcgactaaagaacaattatcaaggaataggaaatttctagaaaaccgttatatctgtgaagtccaattggaacgtctttcaaatggtcatgaaaaaattagaaatcatgaaaataggtttcgcacagaggactatgtgaaagaagcacgtgcgatattgataagacaacaacaaagatattcggaaattacggatgaatttattgaggattttatcaatatcttaaaatcaaaacgtgaatatttcgatggtcctggatctgaaaagtcaccaaccccctatgggcagtattatttagataaagacgggaaattagcctatacatccatgattaacaagatgcgtggaatatgtacatattttcctgaccatcttcgcattgcaaaaatgtcatatacagccgacttatataatcttttaagtggcgatttaaacaaattattgatcaatggtgaatatctcacttatgaagacaaactttacttgattgatcattttatcaaaaagggcaaaaatattacccttacacaaattctaaagtataaaggtatttcggatgattcagatgtgagtggatatcgtattgatttgaaaaccgacaaaccaatttttacggaatttacaggattcaaagaacttaaaaagatcgtagacaaaaatgatttgccttcatccatcctagaggacatagatttaattgacgacattattgaaatattaacggcagaaaaatcttattacaggcgagaagagcaattaaagccattgttttcggaatatgatcaagaaactattgatagaatagttaatgcttttaaggaaagtacctcctttaagggttaccacgccctatcaaaaaaagcaattgaactaattttagaggatctatggtacacaaacaaaaatcaaatggaattgtttgcggaaagaaaactagaggaaaaacgcctttctgacttgaagactcaaacaaaagttatgtttgatggtgatgctattcttagcactgttgcaaaaagggcgcatcgtgaggcaattaaaatagtcaatgaagtgcgtaaaagatacggcgaaatggatgccattgtaatagaaacagcacgagagaaaaatagtgaggaaaaaagaaaacaatattccgattttcaaagagagatcggtaagcatgaaaaagaaatggccaaacttttaggagtgaaatcattaaaagatcttcggcttaatagcaaacaacatctcgcattaaaactttgggtgtctcaggatagaaaatgcatttattctggtagaagtatctcaattaatgatattgtacaggatccctcaaaatttgaaattgaccatatattacctgtttcactatcctttgatgatagccaagcaaataaagttctttgttatcacagagaaaatcagaaaaagggacaaaaaacaccttttcaatatttttcaactggacaagcatcacgttcgtttgaccagtttaaggtagaagttttgaacttatataagagtaggaaaatcaataacaagaaaaaggattacttgcttgaaatacgagatattgctcataatgaggaattacaaaaagaatttattaatcgaaatctagtagatacacagtacgcaatgcggagcttttctatgtctcttcgtactttctttaacagtcataatattgatacgaaggtgttatccattaggggatcctttactgcagcttttagacgaagggctagattaaataaggacagagaagaaagtcatgcccatcatgctattgatgctctgattgttgcggcaataggacgtatgcccatttttgagttccttaaagagtttgatatgagtgaagaaggtgttgttgttaatagagagactggagaaatattggaagagaatgagttttttaaacataaatacctctcttttatacgaaatctaatgaattatgaatctaaggtgaaatattctcataaggtcgatcgtaaagtgaatcggactatgtcgaatcagacgatttatggaacgagggagaaagatggagacacgtattatcttgggaaggtatctaatatttacaatctggataaacatggtgttgaaccattattaaagagacttgagaaaagccctaatagctttcttattgctgaacataatccaaaacttttcgaattgatacagcttattgtaaaagaatataaaaatgcggataacccttttaaagcttattataatgatcatggttatgttatgaaggatggaaaagttccggtgaaaactttaagatatcgtgatcgtaagttgggtgtccacatgaaaatcacggataagtatccaggtgctaaaagcgatgtggtcttactaagcattaagggggttagggtggatctttataagaatgctgaaggtaagtataaatatttgggcgtcccttatcattggtttaagcagcaagggaataaatatgtattagacatggaaaagtacaatgaggaaaaaatgaaggattataagaagattgatgacacatttgagtttcagatgagcctttataagaatgatttattttcttttgaaaggaaagaaggttcttactttaggatttttagaggagatgcgatgccgagggacaataaaatagaggttgatttcatagataagaaaaaacaagatcgaaaagacggctttctatccccatccacatttaaaaacatagttaagtataatgtcgatgttttaggcaatacttataaagtggaaaaagaaaatttcaaaaacactttacaactatag

SEQ ID NO: 33 - DNA, 3192 bp, Massilibacterium senegalense
  source 1..3192: mol_type = unassigned DNA
gtgctcgaaaattatattttaggtttggatattggtattggttcagttggatatggtcttattgatgaaaatcaaaatattatagatgctggggtacgcttgtttccagaagctgatgtaaacaacaataatggtaggcgagaaaaaagaggagcccggcgattaaaaagacggaaacaacatagagttgctagagtaaaacatctgttagttaaaaatagaattatggcagaagatgcccaacctatctcaaataaaccttatgaaataagagtaaagggattaagcaaagagttaactgatgaagaactagctattgcgcttatacatatcgcaaaacgaagaggtattcacaatgttgaaacaactcttgatgaacaaaaggacgataatgaactttctactaaagaacaaattagtaagaatgaaaagttattaagaaataaatttgtttgtgaattacaattacaaagacttacaagaaataaagaaaacgaaataccatataaagttaggggttaccaaaatcggtttaaaactagtgattatattaaagaagttcagcagatattaaatacacagagacagtataataaaaaaataactgatgaatttattgagcgatatatagagttaataaagaagagacgtgaatattttgaaggcccaggagaaggtagtgagtatggatggggtggtgaccctcgaaaatggtacgaacagttaatggggaaatgtagctattttcctgaagaattgagagctgttaaggccagctactctgcacaattattcaatgcactaaatgatttaaataatatagtgattatgcgagaagaaaataccaaattatcagcagaggaaaaaagacgattaatagaaaaggtttttaaaattcgaaaaaagcccacgctaaagcagattgcaaaagaagttggagtgaatttcgaagatatcaaaggttatagagttaatgccaagggagaacctatatttacttcttttgatttttatcatagtattaagactattacgcaacgtcatgaaataattgaaaatgataaaatattagaccaaatggcacggattttaactgttatgcaaacaccatcagaaaaaagagagcgtttaaaacaggaaattcctgaattaacaacgtccgaaatatcggaaatttcagaattaagattcacgtctacacatagtttatctttgaagttaatttatcttttactacctgaattgtggtcgaccacaaagaatcatatgcaaattttatctgaaatgaaattgaaaccaaaacgcatatcacttaaaggaagaaatcaaattccagtatcaatagtagatgagtggatattatctcctgttgtaaaacgtgcatttacacaatctattagaattgttaatgcaatcatcaaacgttatggtgaaccatctgagattgtgattgaattagcacgtgagagaaatagtgaagatcgaaagaaatttttatcaaaattaaatagaaagaatgcagcaatgaacgaagaggtaaaagaaaagatagaacaactaggcgtatatgataccaaaggattatttgaaatgattaaattatggcatttgcaagatggtcattgtatgtattctttaacaccaattcctttaaatgatttgtttttaaatcctaatcattatgaaattgatcatattattccacgctctatttcatttgatgattcaataaataataaggtacttgtaaagtatatagaaaatcagaaaaaaggaaatttaactccttatcaatacatgaatcgaaaaatagatggagtatcttatgataagtttaaacaacatgttttacaattagcaaaatcatctgataagatgtcaagaaaaaaacgagagtatttgcttgaagaacgtgatatcaataagtttgaagttcaaaaagaatttattaatcgtaatcttgttgatacaagatatgtaacacgagaattaatgaacttattaaagacctttttttctgaaaataataaaaatgtaaaaattaagtccattaacggatcatttactcattatttacgaaaattatggagatttaaaaaagatcgtaatatagattataaacaccatgcagaagatgcattaattattgcaatggcgggatacttatttagtaaaaaggaagtattagcaaaacaaaatctaatattatctgatcctcatattgttaataaagaaacaggcgaaattttaagtgaagatgattttactaaaacattcattgataaatatgaaaaagtggctactataaaaaaatatcaaaattataagtattctcatcgagtggaccagaagccaaatagacaattgatgaacgatactatttgttcaactagaacggtcgataacaatgaatatgttattaaaaaaattaaagatatttatgctaaggataatacagatttggttaataagattagaaagagtccaaaaaagcttctaatgtatcataacgatagacaaacttatgaaaaaataaaaagtatcatggagcaatatggggatgctaagaatcctttgtacaaatataaagaagaaacaggtgaatttgtaacgaagtatagtaaaaaagataacggtcccccaattctatcggtaaaatattatagtggaaaattaggtgagcataaagatatcacgcataaatttcataattctaagaaaagagttgttaatttatctataaagccatttcgaatggatgtatataaggaagatggcatctataaatttgtgactgttcgttttaatgatttaaaagaaaaaggagataattatgagatttgcaaaaaaatatatgaagagaaattaaaaaagaagaaaataaataataagtcaaattttctatttagtttaaataagtatgatatttttgaactagataatgaagaatttctatttataggtgtaaatcatgataaaactaatcggatagaatgtaattggataaatcaaaattataaaaattttgcagagttaaataatcttaaaaataagcagttacgaaaatcaattagtaaaaacatcatacagttcgagaaatttgcaacggatgtattaggaaatcgttataaagtaacaaatgaaaaattaatattttcgtatccaaaaaagtccatgagaggtgtacgatga

SEQ ID NO: 34 - DNA, 3930 bp, Kurthia huakuii
  source 1..3930: mol_type = unassigned DNA
atgaattattcaattggtttagatattggaacaacaagtgtaggctgggcttgtatcaatgagcaacatgaaattttacgctatcaaaataaatgggcgataggtgtacgtgaatttgaagctgcgcaaacggcagaaactactagacaaaagcgccaaactcgacgtcgttataaccgtcgtaaaaaaagaattcagttagtgcaacagttattttcagcttatgtacctacagatttttttggagcaacagattcactccatttttggaaaaatgacaatcaatttgagcaacgtactttatcacaagtattaaaagaattacgtattaaccctaaaaaaattccaactatttatcatttgagaaaattactaatggaaggtccaaaacaagatattcgcttaatttatttggcgatacataatttaataaaatatagaggccattttctaaatactgggcgctggacgaagcaaaatcaagggtttaattttttagtagagtgcagcgacatagtaactgcctatagtgaaatcaatggtttagcattaccatctctcgactttcaggcaatacagtccatcattgaagataccgatatggtgcgcaaagataaacaaaaacaattagaaaaagtatcatcaaaatcatttgtgccattgtggcaactactattagggttaagtgtaaatgcagaaaaactgtttgttgaatcgcaaaatacaatactttataaagaagctaaattgaaattagttttaggaagtgaagaattagacgaggtgcgtgaaaatttaacagaagtagaaaatcattttattgatgaagcttttgcactatatcagcaaataatgctacaagatttgttgcaaggacatgaatgtgttgcagcatctaaagtggctagttatgaaaaatatcaagaagatttgtgtgaatttaaacgtcttataaatgaaactaaagatgaagcattatatcgtcgcttatttattacgcccaaaaaagcaatggcagaatataaggaacaaccgaataaagataataaagagaaattatgtttattagatcgttacaatcgtagttcaaaagataaagaagcggtactgaatactatggctaaactattagcaacatcaaatgtaaatcatcatgccgatttgattgaaaatataaaagaaggcacatttttagcacatcaaaaaggcacacataatgcggcaattccaaatcaaaatagtatttatgaaatcgaacaaattttaacgaatcagcaatcgtattatagttttatcaccgatgaatttattaataaagttatcgaaattgcttcattccgtattccatattacattggaccattggcaaagaataatcaaagtaaatttgcatggttagagcgtataaacaatgaagggcatattacaccagcaacatttgattcattagttaatgaatcgataactgctgagcaatttattaaacgcatgattaataagtgcacatatttacaggaagaagatgttttaccaaaacagtctttattgtatcaatattttgaagtgttaaatgaactaaatagtattcagattcgcccagctaatgcggcaagtcatacaaaatatcgtttaccaattgaagccaaaaaatgtgtgattgaatttggttttcgacaatacaaggtaatgacacataagcgtttaattcaagtattaaaagaacagcaatttgagtatttgattggtgaagattatgaagtatttggcactcaacaagaaggacgatttgcaagcagtttaaaatcgtatgttgaatttaaatcactatttaaaaatagtgcagtaccatttgatgaagtaatgattgagcaattgattgaatggttaacaatttttaatgaaaagaccattattaaaaagaaaataaaagaacagtatccaaaatttcctgatgtgatgattgagcgcgtacttaaaaagaattttgttggatggggaaatttaagtaagaaattattagatgaactgattttaaatgatggaaaaacagtgattgaaaaaatgtgtgattctactttaaattttagagaaatgttgacggtgaaaaactctaatttagaagaattaattaagaaaaacaatcgttcaaaacgtcaaacgaaaaaaattaaatataaagatgtacaagatttagcgggatctccagcattgaaacgaggtatttggcaggctattaaagtagtagaggaacttacggaaatttttggagaaccacagcatattatgctagaagtagcacgcgaagaaggtacaaagcaacgtacgcaaagtcgtctgatgaagtttaaagcagtagtagacggtttaggtaaggacgaaaaatctctaaaaaatgaattaaactcgtatttaaatgagccagaagcaaaatttaaagacaatcgattttatttatatttactgcaacaaggtaaatgtgcatatagtggaaagcctttggatgttcaacacttagcgcagtatgaaattgatcacatttatccgcaaaattttgtgaaggatgatagtttagataatctagtattagtagaaaaatcacgcaaccaacaaaaaggtggtttcaagatgcctttagaaattttaaatgctgcagaaggagcgcgtatgcgtggcatttggaaaagttggcttgataaaggattcatgaatgataagaaatttcatcgcttatgtaaggctgctttttcagagctggatcgtgaccaatttattgcacgccagttagttgaaacaagacaaattattaaaaatgtaggcgtgctgttagaagaacgttttagtgagacgaccgttcacttagtaaaagcgccgattgtttcgaaatttagaaaagctttagaactacctaaattacgtaacttaaataataaacatcatgcgatggatgcacttttaaatgcgttattaattaatcacgcaattcaacagtacggtgaaaatattttcgctttctcatttaaagacaaagagcgatcaagtaaattagcaaaagcagctcaacaaaaaaatggctttttcttatttaatagttttttatctgaacaaataaaagggcctcgctctcgtaaaactttatctgctatagcatacgtagaagaaatttattatgagttaccttggcaaacaacaaagaaaataggaaatagcgacgaaatgttttttgatgaaacattacactcacccaaaataaaaccagcgaaatatgaatcgaataaaactaacctaagtgttcatgatagtgtgaaaagttctgctgttattgtagtgaagttgatggaacaaacaaaaaaacaaattgtcgagaaaatagatttgattcagttgagtgtattagaagataagcagtggcagcatttatctaatgatgagaaagctttgaaattagcatctcgtaaatattctactaaaaaaattatagctgctacatggattatgaaactgtcaaaatatcaaaaatttatgtggaataatcagatgttttatttagcgtcgatgaaggagcgacatttagcaacacaatttatagtacctaaagagttattgatggcctatttgcaagccaatgaacaaacttcagtggcaaagttgcaaacaatttatgccacgattgccgaagagatgtttaaacagtatccaatttatagagaagggaatatgccaaagaaggtagcagaatttacaaaagatattcaaaattttgaacaaatgacaaaacaagtaacagaaatttttaaagcgacagcgaataatgccacgcgttcggacagtttaggtagtaggttatctaaagttatgaaagcggcagaaatcaaagtagtttatgagtcgattacaggattgaaagtaagaaaacctaaagaattatattaa

SEQ ID NO: 35 - DNA, 4128 bp, Streptococcus equinus
  source 1..4128: mol_type = unassigned DNA
atggaaaaatcatattcaatcggactcgatatcggaacaaatagtgtgggctggagcgtaattactgatgattacaaagttccagctaaaaagatgaaagttttaggaaatacagataagaagtatatcaagaaaaacttactgggtgcactgttatttgatagcggtgaaactgctgaagcaacacgtttaaagcgtactgctagacgtcgctatacacgtcgtaaaaatcgtttacgttatctacaagaaatttttggtaaagaaatggcaaaagttgatgaaagtttctttcaacgtttagaagaatcttttttgacagatgatgataaaacctttgattctcatccaatttttggaaataaagccgaagaagatgcttatcatcaagagtttcctacaatttaccatttgagaaaacatcttgcggactcacctgaacaagctgatttgcgtttggtttatcttgctttagctcacatgattaaattccgtggacattttttgattgaagggcaattagacgctgagaatactgatgttcaaaagttattcaatgattttgttgaagtgtatgatagaacccttgatgacagccacttatcagaaattacggttgacgcttcaagtattctaacagaaaaatttagcaaatcacgtcgtttagagaatcttattaaacactatccgacagaaaagaagaataccttatttggaaatcttgttgctttagctctaggattacaaccaaactttaaaacaagttttaaactatctgaagatgctaaattgcaattttctaaagatacttatgaagaagatttagaagagttacttggaaaaattggtgatgagtatgcggacttatttacatcagctaaaaatctttatgatgctattttgttgtcaggaattttaacagtagctgataataccacaaaagctccactatcagcttcaatgattaagcgttacaatgaacatcaagtagatttaaaaaaattaaaagaatttatcaaaaataatgcttctgataagtatgatgaaattttcaatgataaagataagaatggttatgctggttacattgaaaatggagtcaaacaagacgaattctataaatatttaaaaacaacactttctaaaattgatggaagtgattatttccttgataaaattgaacgtgaagattttttgagaaaacaaagaacgtttgataatggctctattccacatcaaattcatttacaagaaatgcgtgctattttacgacgtcaaggtgagtattatccattcttaaaagaaaatcaagctaaaatcgaaaaaatattaacttttagaattccttactacgtaggtccattagcaagaaaaaatagccgttttgcttgggctaaataccattcagatgagccgattacgccatggaattttgatgaagtagtagataaagaaaaatcagctgaaaaattcattacacgaatgactttaaatgatttgtatcttcctgaagaaaaagttttaccaaaacacagtcatgtatatgaaacatttgcagtatacaatgaattgactaaaattaagtatgttaatgagcaaggtaagtcatttttctttgatgcaaatatgaagcaagaaatctttgatcacgtatttaaagaaaatcgaaaagttacgaaggctaaacttttaagctatcttaataatgagttcgaagagtttcgaatcaatgatttaattggtcttgacaaagatagtaaatcatttaatgctagccttggaacctatcatgatttgaaaaagattttagataaatctttcttagatgataagacaaatgaacaaatcattgaagatattgtgttgactttgaccttatttgaagatagagatatgattcatgaacgtcttcaaaaatatagtgatatctttacttcacagcagttgaagaaacttgagcgtcgccattatactggttggggacgtctatcttataaattgattaatggaattcgcaataaagaaaacaacaaaactattcttgatttcttgattgatgatgggcatgctaatcgtaactttatgcagttaattaacgatgattcattatcgtttaaaactattattcaagaagcacaagttataggtgacgttgacgatattgaagcagttgttcatgatttacctggaagtcctgctatcaaaaaaggtatcctacaaagtgtcaaaatcgttgatgagctagtcaaagtgatgggacacaatcctcaaaacattgtcatcgagatggcacgtgaaaatcaaataactggctatggaagaaataaatcaaatcaacgtttgaaacgactacaagattctctgaaagaatttggtagcgacattcttagtaagaagaaaccttcttatgttgatagtaaagttgaaaattctcatcttcaaaatgaccgtttgttcctatactatatccaaaatggtaaggatatgtacacaggagaagaacttgatattgatcatttaagtgattatgatattgaccatatcatccctcaagcttttattaaagataattcgattgataatcgagtcttgacaagttcagctaaaaaccgtggtaagtcagatgatgtgccaagtattgaaattgttcgtaatagaaaatcgtactggtataaattgtataaatcaggcctaatttctaaatgtaaatttgataatttaactaaagcagaacgtggtggattaactgaaactgataaagcaggatttattaaacgccaattagttgaaacacgtcaaattacaaaacatgtcgcacaaattttagatgcccgctttaatacaaaacgtgatgaaaatgataaggtgattcgtgatgtaaaagttattactttgaaatcaagtttagtttcgcaatttagaaaagaatttaagttctataaagttcgtgaaattaatgattatcaccacgctcacgatgcttatctcaacgcagtagttggaacagctttgcttaaaaaatatccaaaattagcaccagagtttgtttatggtgagtataaaaaatatgatgtccgtaaacttgttgccaaatcttctgataaccattctgaattaggtaaagcaactgcaaaatacttcttctattcaaacttgatgaacttctttaaaactgaagtcaaatatgcggatggtagagtatttgaacgaccagatattgaaacaaatgcagatggtgaagttgtctggaataagcaaagagattttgacattgttcgaaaagttctttcttatccacaagttaatattgtgaagaaggtagaagagcaaacagtaggacaaaatggtgggttatttgataataatattttagctaagccagaaaaagatgataagaaaaaattatttccaattaaaaattcactctctacaacttcatatggaggatatgctagagctacaatagcttattcaattttgattgttagtgaatctcgtgaaaggaaagaattaaaattgttaggtttacctcttcttgacaaagtgaaatatgagaaaaatcctactgcttatttaaatggtattggaatagtaaatataaaaaatatctttaaactttccaaatattgtttgttggaatttaaagagaaaagcattacttatcatagatatatggtaagtaatcaagaattaaaaagagctaatcaattatctttaacttgtaaggaaactgagttaatatacacgtatataaaaagtggggaagataacattcaattagatggtaacgaaaaagtaatattatccctttggaataaaatgattgcttttatggagcagacaaaattaattgataagaaattgtttgtatctttgaaagaattaaaagatgaagtaaatttaataaacattttagatattgcttctaaatcgattgactttacaaaaataagtgcagggcagaagaaaatagtgttgaatgattctttatctctcccaattaaaagatggcaatttaagagtgatgaaaaaatgctaaaacaattgaatgatgccaccctcatccaccaatctgtcactggtctttatgaaacacgtattgatttgagtaaattaggagaagagtaa

SEQ ID NO: 36 - DNA, 4047 bp, Streptococcus equi
  source 1..4047: mol_type = unassigned DNA
atgaaaaaaccttatactattgctcttgatattggtactaatagtgtaggatgggttgttgtgacggatgattatagggttccaacaaagaaaatgaaggtactaggaaatacagagcgaaaaaccattaagaaaaatttgattggtgccttattatttgatagtggtgatactgcagagggaactcgcttaaaaagaacggcccgtcgcagatatacaagaagaaagaatagactacgttaccttaaagaaatttttactgaggaaatggcaaaagtagatgatggtttctttcaacgactggaggattcattctatgttttagaggataaggagggaaataagcatccgatttttgctaatctagcagatgaagttgcttatcataaaaagtatccaacaatttatcatttacgaaaagagttagtagataatcctcaaaaagcagatttacgcttaatttatttggcagtagcgcatattattaagtttaggggacattttctgattgagggaacattaagttcaaagaataataatcttcagaaatcatttgatcatcttgtggatacctataatctattgtttgaggagcaacgattgcttactgaaggcattaatgccaaagagctgttgtctgcagcattaagtaagtcaaagcgtttagaaaatctcatttctctgattcctggacaaaagaaaacgggtatttttggtaatattattgcactctcgctaggattaacaccaaattttaaagctaattttggtttaagtaaggatgtcaaattacagttggctaaggatacctatgctgatgatttggatagtctactggctcaaattggagatcagtatgctgatttattcttagcggctaaaaatttatcagatgccattcttttgtcagatattttgacagaaagtgacgagataactagagcacctctgtcagcgtctatggtaaaacgttatcgtgagcatcacaaggacttggtcactttgaaaacattaataaaggatcagttaccggagaagtaccaggaaatttttttagataagactaaaaatggttatgctggatatattgagggacaagttagccaggaggaattttacaaataccttaagcctattttagcaagattggatggatcggaaccgttacttctaaaaattgaccgagaagactttttgagaaagcaacgaacctttgataatggctctattcctcaccaaattcatttagaagaattacacgctattttgagaagacaagaagtcttctacccatttttaaaagataatagaaagaaaattgaatctcttttaacgtttagaataccttattatgtgggtccgttggctcgtggtcatagtcgctttgcatgggtaaagcgaaaattcgatggggctattagaccctggaattttgaagagattgttgatgaagaagcttccgcacagatctttattgaaaaaatgactaaaaatgatctctacttgccaaatgaaaaggttcttcctaagcatagcctattatatgaaacttttacagtttataatgagctaacaaaggtcaaatatgctactgaaggaatgacacgtcctcaatttttatctgctgatcagaaacaagctattgttgacttattgtttaaaacaaatcgtaaagtgactgttaaacaattaaaagagaactattttaaaaagattgagtgctgggatagtgttgagattactggggttgaagatagcttcaatgcttcacttgggacctatcatgacttgttaaaaatcattcaggataaggattttttagataatcctgacaaccagaaaatcattgaagatattattttgaccttaacactttttgaagataaaaaaatgatttcaaaacgattagatcaatatgcacatctctttgataaagtcgtattgaataaactggagaggcatcactataccggttgggggcgtttatcaggaaagcttataaatggtattcgagacaaacaatcaggaaaaacaattttagattttctaaaggctgatggttttgccaatcgaaactttatgcagttaattcatgatagtgaactaagctttatagatgagattgctaaagcccaagtgattggaaaaactgagtattcgaaagacctggttgggaatttagcgggtagtccggctattaaaaaaggtatttcacaaacaattaaaatcgttgatgagctggtcaaaatcatgggctatctcccgcagcagattgttattgaaatggcacgtgaaaatcagactacagctcaaggaattaaaaatgctcgtcaacgcatgagaaagctagaagagactgccaaaaaattgggtagcaatattctgaaggagcaccctgttgataatagtcaattgcaaaatgataagcgttacctctattatcttcaaaatggaaaggatatgtatacgggtgatgacttagatattgattatttgagtagctatgacattgatcatatcattccgcagagctttattaagaataattccattgataacaaggtattaacctcacaaggcgctaatcgaggaaaattagataatgttcctagtgaggctattgttaggaaaatgaaaggctattggcaatccttattgagagcaggagctatctcaaagcaaaaattcgataatctgacaaaagcagaacgtggaggtttaactcaagtagacaaagccggctttatccaacgtcaattagtggagacacgccaaatcacaaaacatgtggcacaaatcttagatagtcgcttcaatactgaatttgatgatcataataagcgtattcgaaaggttcatattataacgctaaaatcaaagctggtttctgatttccgtaaagagtttggtttgtataaaattcgtgatatcaatcattatcatcatgctcatgatgcataccttaatgctgttgttgccaaagcgatactaggtaagtatcctcaactagctccagaatttgtttatggagattaccccaaatataatagctttaaggaacgccagaaagcaactcaaaagatgttattttattcaaatatcttaaaattctttaaagaccaagaaagtcttcatgttaactctgatggtgaagaaatatggaatgccaataagcatttacctattattaaaaatgttctttcgattccgcaggttaatatcgtcaagaaaacggaagtacaaacagggggcttctataaagagtccattttgtctaagggtaattctgataagctgatcccaaggaaaaataactgggataccaggaagtatggtggctttgatagtccaactgtagcttattctgttttggtgatagctaaaatggaaaagggaaaagcaaaagtattaaagccagtgaaggaaatggttggtattaccattatggagaggaccgcatttgaagaaaatcctgtagtctttttagaagcaagaggctatcgagaaattcaagagcatctcattataaaactccctaaatatagcttgtttgaattagaaaatggaagaagacgtttattggcaagtgctagtgaactacaaaaaggaaatgaattgtttcttccagttgattatatgacatttctatatttagctgctcattaccatgagctaactggatcctcagaggatgttttgaggaaaaaatattttgtagataggcatttgcattattttgatgacattattcaaatgattaatgattttgcagagcgtcatattcttgctagtagtaatttagagaaaataaaccatacatatcacaataattctgaccttccagttaatgaaagagcagagaatatcattaatgtgtttactttcgtagccctaggagcacctgcagcctttaaattttttgatgcgactattgatcgaaaacgatatacctcaactaaggaagtgctaaatgccactctcattcatcaatctgttactggtttgtatgagacgcgaattgatttgagtcaattaggagagaactaa

SEQ ID NO: 37 - DNA, 4023 bp, Enterococcus faecium
  source 1..4023: mol_type = unassigned DNA
atgaagaaagagtatacgatcggattagatatcgggaccaattccgtcgggtggtccgtattgacagatgactatcgactggtttccaaaaagatgaaagtagcaggaaatacagaaaagagtagcacgaagaaaaacttttggggtgttcgactttttgacgaaggccagactgccgaagcaagaagaagcaagcggaccgcgcgcaggaggttagcgagacgcagacaacgaatccttgaactgcagaaaatattcgcaccagagatcttaaaaatagacgaacacttttttgctcgactgaatgaaagttttttagtcctagatgaaaagaaacagtcgagacatccggtctttgctacgatcaagcaagaaaaaagctaccatcagacttacccgacgatctatcatttgagacaagcgctagctgactcttcagagaaagcggacatccgtctcgtttatttagcgatggctcatctcttgaaatatcggggacattttttgattgagggtgaattaaatacggagaattcctcagtgacagagacttttcgtcaatttctgagcacatataaccagcaattcagcgaagcagacgacaaacaaacagaaaaattagacgaagcggtcgattgttctttcgtttttacagaaaagatgtcgaaaacaaaaaaagcagaaacgctcctgaaatattttcctcatgaaaaatccaatggttatctcagtcaatttataaaattaatggtagggaatcaggggaatttcaaaaatgtatttggattagaagaagaagcaaaactgcaattttcaaaagaaacatatgaagaagaccttgaagaattgttagagaaaatcggagatgattacatcgatctttttgtccaagcgaaaaatgtttatgatgctgtcttgttatctgagattctttctgacagcacgaaaaatacacgagcgaagctttcagcagggatgatcagacgctatgacgcacataaagaagacttggtccttctgaaacgatttgtgaaagagaatctgccgaagaaatatcgcgccttttttggggataattcagtcaacggatatgcagggtatatcgaagggcatgcgacacaagaagatttctataaatttgtcaaaaaagaactgacaggtatccgaggcagcgaggtgttcctgacaaagatcgaacaagagaattttttgagaaaacagcgcacatttgataacggtgtgatcccgcatcagatccatttgaccgagctgagagcaattattgcaaaccagaaaaagcattatccttttttaaaagaagaacaagaaaagctggaaagtttattgaccttcaagataccgtattatgttggtccgttagcaaaaaaacaggaaaatagtccatttgcgtggcttatcagaaaatcagaggaaaagatcaaaccttggaacttacctgaaatagtggatatggagggctctgctgtccggtttatcgaacgaatgatcaacacagatatgtacataccacacaacaaggtattgccaaaaaacagcctgttgtatcagaaattttcgatctataatgagttgactaaagtaagatatcaagacgaacgtggtcagatgaactatttttccagcatagagaagaaagaaatctttcatgaattgttcgaaaagaatcgaaaggtaaccaaaaaagatttacaagaattcttgtatttgaaatacgatatcaaacacgcggaactgtccggcatcgaaaaagcattcaacgcttcctatacaacgtaccacgattttttgaccatgagtgaaaataaaagagaaatgaaacaatggctggaagatcctgaattggcatcaatgtttgaagaaatcatcaaaacgctgactgtttttgaggatcgggaaatgattaaaacaaggctgagtcatcatgaagcgactttaggtaaacacataatcaagaaacttacaaaaaaacattacactggttggggtagattatcgaaagaactgattcaaggaatccgagacaaacaatcgaacaaaacaatcttagactatttgatcaatgatgacgattttcctcatcatcgaaatcgtaacttcatgcagctgatcaatgatgatagtttatcgttcaaaaaagaaatcaaaaaagcacaaatgatcacagacacagaaaatctggaagaaattgtcaaagaattaacaggcagtccggctatcaaaaaaggtatcctccaaagtttgaagattgtagatgaaatcgttggcatcatgggctatgaaccagcaaacatcgtggtcgagatggccagagaaaatcaaacgacgggcagaggactcaaaagttcacggccgcggttgaaagctttggaagaatcacttaaagatttcggcagtcaattgctgaaagagtatccgaccgataacagctccctgcaaaaagaccgattatatctctattatttgcagaatggtcgagacatgtatacaggtgcgcctttagatatccatcgattatcagattacgatatcgaccatattatcccaagaagttttacgaccgataactcaatcgataacaaagttttagtttcctcaaaagaaaatcgtctgaaaaaagacgatgtaccaagtgagaaagtcgtgaaaaaaatgcgcagtttctggtacgacctttattcgtctaagctgatcagtaaaagaaaacttgataatctgacaaaaatcaaattgacggaagaagacaaggcaggattcatcaaacggcagttggtggaaacgcgtcagattaccaaacacgtagccggtattttacatcatcggttcaataaagcagaagacacaaatgaaccgatacgtaaagttcggatcatcacgctcaaatctgcactagtcagtcaattcagaaaccgtttcgggatctataaagtacgtgagattaatgaatatcatcacgcacatgatgcatatctgaacggtgtggtcgctcttgctcttttgaagaaatatccgcaactagcaccggaattcgtttatggcgaatatctgaagttcaatgcgcataaagcaaacaaagcgacggtaaaaaaagaattttattcgaacatcatgaaatttttcgaaagtgacacaccggtttgcgatgaaaatggcgagattttctgggacaaatcaaaaagtatcgcacaggtaaaaaaagtcatcaatcaccaccatatgaatatcgtgaaaaaaacagaaattcaaaaaggaggcttctcaaaggaaacagttgagcctaaaaaagattcttctaagctgttacctcggaaaaacaactgggatccagctaaatacggcgggttaggtagcccaaacgttgcttacacagtcgctttcacttatgaaaaaggaaaagcgcgcaaacggacaaatgcgctagaaggcatcacaatcatggagagagaagcatttgaacaatcccccgttttatttttgaaaaacaaagggtacgaacaggcagaaattgagatgaaattgcctaagtacgcgctatttgaactagaaaacgggcgtaaacgaatggtcgcaagcaataaggaagcacaaaaagccaattcatttctcttgccggagcatctagtcacacttctttatcatgcaaaacagtacgatgagatttctcataaagaaagttttgattatgtgaatgaacaccacaaggagttttcagaagtgtttgcccgtgtcctcgaatttgcagggaaatataccttggcagagaaaaatattgagaaactggaaaaaatttacaaagaaaaccaaacggatgatctagctaaactagcaagttcttttgtcaatctcatgcagttcaatgcgatgggcgcaccggctgatttcaaattttttgatgtgacgatcccgcgaaaaaggtacactagcttgactgaaatctggcagtcaacgattattcatcaatcaatcaccggattatatgaaactcgtatcaggatggggaaataa

SEQ ID NO: 38 - DNA, 3993 bp, Enterococcus italicus
  source 1..3993: mol_type = unassigned DNA
atgaaaaatgattacacgattggattggatatcggtacgaactctgttggctattctgttgtgacggatgattacaaagtgatttcaaaaaaaatgaacgtatttgggaatacggaaaagaaatcaatcaaaaaaaatttttggggtgtgcgattatttgaaagcggccaaacagcacaagaagccagaatgaaacgaacctcgcgtcgaagaattgcgagaagaaaaaatagaatttgctatcttcaagaaatatttcaaccagagatgaatcatttggacaataatttcttttatcggctaaatgaaagttttcttgttgcagacgatgctaaatatgataaacacccgatttttggtactttggatgaggaaatccactttcatgagcagttccctactatttatcatttgagaaaatacttagctgacggtgatgaaaaagctgatctaagactcgtttacttggctattgcgcatattattaagtttagagggaactttttaattgaaggtgaattgaatactgagaacaactcagttatcgagctttccaaagtttttgttcagctatacaatcagacattaagcgagttagaagggtttcaattcattgatgagtccatcgatttttctgaagtattaacccagcagttaagtaagtctgaacgagctgataatgttcttaaactttttccagatgaaaaaggaacaggaatcttcgcgcaatttatcaagttgattgtaggaaatcaaggtaacttcaagaaagttttccaacttgaagaagatcaaaagttgcagctatcaacggatgattatgaagaaaacattgagaatttattagcaataattggtgatgaatacggcgatatatttgtagcagcacaaaatttgtatcaagcaatcttattagctggaattttaacttcaacggagaaaacaagggcaaagttgtcagcttcgatgatccaaagatatgaagagcatgccaaagatttaaagttattaaaaaggtttgtaaaagagcatattccagataagtatgctgagatttttaatgatgcgacaaaaaatggatacgccggatacattgatggaaagacgaaagaggaagaattttataaatacttgaaaaccactttggttcagaagagcgggtaccagtattttattgagaaaatagaacaagaaaactttttacggaagcaaagaatatatgataatggtgttatcccgcatcaagtccatgcagaagaattacgtgcaatactgagaaaacaagaaaaatactattcatttttgaaagaaaatcatgaaaaaatagaacaaatatttaaagtaagaattccttactatgttggtccattggcgaaacacaatgagcaaagtaggtttgcttggaatataagaaaatcggatgaaccaattcgaccttggaatatgaatgatgttgtcgatgagaatgcttcagcagtagcctttattgaaagaatgacgataaaagatatttatcttaacgaaaatgttttgcctagacatagcttaatctatgaaaagtttacagtctttaatgaactgacaaaagtattgtatgcggatgatagaggtgttttccaacgattttcagccgaagaaaaagaagatatctttgaaaaactatttaaaagtgaaaggaaagtaacaaagaaaaaattagaaaactatttacgtatcgaactatcaatatcaagcccatcagtaaaaggaattgaagagcaatttaatgccaattttgggacatatttagatttgaaaaaatttgatgaactgcatccctatttagatgacgaaaaatatcaagatactttggaagaagtaataaaagtattaactgtctttgaagatcgctcgatgattcaaaatcaacttgaacaattaccactgaatttatcgacaaaaacgataaaagcattgagccgcagaaaatatactgggtggggcagattgtcagctagactaattgatggaattcacgacaaaaattctggcaagacgattttggattatttaattgaagatgaatctgattcgtatatagtaaatcgtaatttcatgcaattaattaacgatgatcacctatcttttaagaaaataattgaagacagccaaccgtataaagaacagcaatctgctgaagagattgtttccgaattgagtggaagtccagcaataaaaaaaggaatcttacagagcttaaaaatagtagatgagcttgttgctatcatgggttacaagcctaaaaacatcgtggtagagatggccagagaaaaccaaacaacaggtcgtggaaaacaaaattccaagccaagattgaaaggtattgaaaatggattgaaagaattctctgacagtgttttaaaggggagttcgattgataacaagcagcttcaaaatgacagactttacttgtactatcttcaaaatggaaaagatatgtacactggacatgaattagatatcgatcacctatcgacctacgatatcgaccatattatcccacaaagtttcttaacagataattctattgataatcgagtattgactacttctaagtcaaacagagggaaatctgacaatgtgccaagtgaagaagtggtcagaaaaatggatcgcttttggagaaagttgctaaatgcaaaacttataagtgagcgtaagtatacaaatctaactaaaaaagaactaacggaaagtgataaagcaggatttttgaaaagacagttagttgaaactagacaaattacgaaacacgtagcgacaattttagattcgaaatttaacgaagatagtaataatcgagatgttcagataattacattgaaatcggctcttgtttcagaatttagaaagactttcaatctttataaagtgcgcgaaataaacgatctacatcacgctcatgatgcgtatttgaatgcagtagtagctctatctttgttgagagtgtacccacagttgaagccagaatttgtttatggagagtatggtaaaaattccatacatgatcaaaataaggcgactataaaaaaacaattttatagcaatatcacaagatattttgctagcaaagactatattatcaatgatgatggagaaattttatggaataagcaagaaacaatagcacaagtgattaagacactaggtatgcatcaagtaaacgtcgtgaagaaagttgaaattcaaaaaggtgggttctctaaagaatcgatacaaccaaaaggtgaatctcaaaaactgattagaagaaagcagcaatggaatacaaaaaaatatggtggatttgatagcccagtagttgcctatgctattttacttagttttgataaagggaaaaggaaagctagatcatttaaaatagttggcataacaattcaagatagagaaagttttgagggaaatccaattctctatttatcaaaaaaagattaccataatccaaaagttgaggctattttacctaaatattctttatttgaatttgaaaatggccgtagaagaatggtggcaagtgcttctgaaactcaaaaaggaaaccagttgatcattccaggacatttaatggagttattgtaccattcgaaaaaaattattaatggtaaaaatagcgatagcgtgagttacattcaaaataacaaagagaaatttagagaaatttttgaatatattgtagatttctcaagcaaatatatttcagcagatgcaaatctaaataaaatagaaaaaatatttgaaaataattttcacaaggcaagtgaacaagaaatagcaaaatcgtttattaacttattaacatttactgctatgggagctcctgcagattttgaattttttggtgagaagatacctagaaaacgatatgtctccataagtgaaataatagatgcggtttttattcaccaatcgattactggactatatgagacaagggtacgtctaacggaggtctaa

SEQ ID NO: 39 - DNA, 4155 bp, Streptococcus agalactiae
  source 1..4155: mol_type = unassigned DNA
atgaataagccatattcaataggccttgacatcggtactaattccgtcggatggagcattattacagatgattataaagtacctgctaagaagatgagagttttagggaacactgataaagaatatattaagaagaatctcataggtgctctgctttttgatggcgggaatactgctgcagatagacgcttgaagcgaactgctcgtcgtcgttatacacgtcgtagaaatcgtattctatatttacaagaaatttttgcagaggaaatgagtaaagttgatgatagtttctttcatcgattagaggattcttttctagttgaggaagataagagagggagcaagtatcctatctttgcaacattgcaggaagagaaagattatcatgaaaaattttcgacaatctatcatttgagaaaagaattagctgacaagaaagaaaaagcagaccttcgtcttatttatattgctctagctcatatcattaaatttagagggcatttcctaattgaggatgatagctttgatgtcaggaatacagacatttcaaaacaatatcaagattttttagaaatctttaatacaacttttgaaaataatgatttgttatctcaaaacgttgacgtagaggcaatactaacagataagattagcaagtctgcgaagaaagatcgtattttagcgcagtatcctaaccaaaaatctactggcatttttgcagaatttttgaaattgattgtcggaaatcaagctgacttcaagaaatatttcaatttggaggataaaacgccgcttcaattcgctaaggatagctacgatgaagatttagaaaatcttcttggacagattggtgatgaatttgcagacttattctcagcagcgaaaaagttatatgatagtgtccttttgtctggcattcttacagtaatcgacctcagtaccaaggcgccactttcagcttctatgattcagcgttatgatgaacatagagaggacttgaaacagttaaaacaattcgtaaaagcttcattgccggaaaaatatcaagaaatatttgctgattcatcaaaagatggctacgctggttatattgaaggtaaaactaatcaagaagctttttataaatacctgtcaaaattgttgaccaagcaagaagatagcgagaattttcttgaaaaaatcaagaatgaagatttcttgagaaaacaaaggacctttgataatggctcaattccacaccaagtccatttgacagagctgaaagctattatccgccgtcaatcagaatactatcccttcttgaaagagaatcaagataggattgaaaaaatccttacctttagaattccttattatatcgggccactagcacgtgagaagagtgattttgcatggatgactcgcaaaacagatgacagtattcgaccttggaattttgaagacttggttgataaagaaaaatctgcggaagcttttatccatcgtatgaccaacaatgatttttatcttcctgaagaaaaagttttaccaaagcatagtcttatttatgaaaaatttacggtctataatgagttgactaaggttagatataaaaatgagcaaggtgagacttatttttttgatagcaatattaaacaagaaatctttgatggagtattcaaggaacatcgtaaggtatccaagaagaagttgctagattttctggctaaagaatatgaggagtttaggatagtagatgttattggtctagataaagaaaataaagctttcaacgcctcattgggaacttaccacgatctcgaaaaaatactagacaaagattttctagataatccagataatgagtctattctggaagatatcgtccaaactctaacattatttgaagacagagaaatgattaagaagcgtcttgaaaactataaagatctttttacagagtcacaactaaaaaaactctatcgtcgtcactatactggctggggacgattgtctgctaagttaatcaatggtattcgagataaagagagtcaaaaaacaatcttggactatcttattgatgatggtagatctaatcgcaactttatgcagttgataaatgatgatggtagatctaatcgcaactttatgcagttgataaatgatgatggtctatctttcaaatcaattatcagtaaggcacaggctggtagtcattcagataatctaaaagaagttgtaggtgagcttgcaggtagccctgctattaaaaagggaattctacaaagtttgaaaattgttgatgagcttgttaaagtcatgggatacgaacctgaacaaattgtggttgagatggcgcgtgagaatcaaacaacaaatcaaggtcgtcgtaactctcgacaacgctataaacttcttgatgatggcgttaagaatctagctagtgacttgaatggcaatattttgaaagaatatcctacggataatcaagcgttgcaaaatgaaagacttttcctttactacttacaaaacggaagagatatgtatacaggggaagctctagatattgacaatttaagtcaatatgatattgaccacattattcctcaagctttcataaaagatgattctattgataatcgtgttttggtatcatctgctaaaaatcgtggaaagtcagatgatgttcctagccttgaaattgtaaaagattgtaaagttttctggaaaaaattacttgatgctaagttaatgagtcagcgtaagtatgataatttgactaaggcagagcgcggaggcctaacttccgatgataaggcaagatttatccaacgtcagttggttgagacacgacaaattaccaagcatgttgcccgtatcttggatgaacgctttaataatgagcttgatagtaaaggtagaaggatccgcaaagttaaaattgtaaccttgaagtcaaatttggtttcaaatttccgaaaagaatttggattctataaaattcgtgaagttaacaattatcaccatgcacatgatgcctatcttaatgcagtagttgctaaagctattctaaccaaatatcctcagttagagccagaatttgtctacggcgactatccaaaatataatagttacaaaacgcgtaaatccgctacagaaaagctatttttctattcaaatattatgaacttctttaaaactaaggtaactttagcggatggaaccgttgttgtaaaagatgatattgaagttaataatgatacgggtgaaattgtttgggataaaaagaaacactttgcgacagttagaaaagtcttgtcataccctcagaacaatatcgtgaagaagacagagattcagacaggtggtttctctaaggaatcaatcttggcgcatggtaactcagataagttgattccaagaaaaacgaaggatatttatttagatcctaagaaatatggaggttttgatagtccgatagtagcttactctgttttagttgtagctgatatcaaaaagggtaaagcacaaaaactaaaaacagttacggaacttttaggaattaccatcatggagaggtccagatttgagaaaaatccatcagctttccttgaatcaaaaggctatttaaatattagggctgataaactaattattttgcccaagtatagtctgttcgaattagaaaatgggcgtcgtcgattacttgctagtgctggtgaattacaaaaaggtaatgagctagccttaccaacacaatttatgaagttcttataccttgcaagtcgttataatgagtcaaaaggtaaaccagaggagattgagaagaaacaagaatttgtaaatcaacatgtctcttattttgatgacatccttcaattaattaatgatttttcaaaacgagttattctagcagatgctaatttagagaaaatcaataagctttaccaagataataaggaaaatatatcagtagatgaacttgctaataatattatcaatctatttacttttaccagtctaggagctccagcagcttttaaattttttgataaaatagttgatagaaaacgctatacatcaactaaagaagtacttaattctaccctaattcatcaatctattactggactttatgaaacacgtattgatttgggtaagttaggagaagattga

SEQ ID NO: 40 - DNA, 4113 bp, Streptococcus ratti
  source 1..4113: mol_type = unassigned DNA
atgaaaaagccttactctattggacttgatattggtaccaactctgtcggctgggctgtcataacagatgactacaaagttcctgccaagaagatgaaagttctgggaaatacagacaaaaattacattaagaaaaatttattgggagctttattgtttgatagtggaaatactgcggaagatagacgcttgaaacgtacagcacgccgtcgttatacacgtcggcgaaatcgtttgctgtatttgcaagatattttttcagatgaaatgaataaggttgatgagagttttttccatcgtttagaagattcttttcttgtttctgaagataagcgaggagaccaccatcctatttttggaaatgttgtggatgaagtgaaatatcatgaacagtttcctaccatttatcatttacgaaaatatcttgcagatactccagaaaaagctgatttacgtttggtttatttggctttggcacatatgattaagtttagaggccattttttaattgatgatccgaaattggatgtaaaaaatactgatagtcaggaattgttcagccagtttttaacggcttatgatgtgacacaggaagatagtcatctggcagatgtaaagatcaatatctctgatattattactgaaaaaatgaataagtctcgtaaagtagaagctctattatttcatttcccaagtcaaaagaaaaattcattttttggaaacctcgtgtcacttgtttttggattactccctaattttaagacgaattttaatttagctgaagatgctaagctacagttatctaaggattcttatgatgaagatttggagaatttattaggacaaattggtgatgaatatacagatgtctttgtagctgctcgaaagctgtacgacagcattttgttatcaggaatcttgacggttaatgatttgagtacaaaagcgatcttatctgcttctatggttagacgttatgaagagcataataaggatttagctaaactaaaagcctttgtcaaagcgaattttacacatgatgtatttaaagaagtcttttctgatgcaagtaagaatggctatgcgggttatattgaaggtaaaaccagccaggaagacttttataaatacgtgaaaaatctaattggtaaagtagatggcagtgcagactttattgaaaaaatcgatcgtgaggattttctaagaaagcaacgtacctttgataatggttcaattcctcatcaggtacatttagctgagatgaaggctatcttaagacgtcaaggtgaatactatccgttcctaaaagaacatgctgaaaaaattcaacaaattttgacctttagaatcccttactatgtcggtcctttggatcgtcatggtcatagtgattttgcttgggcaagctttaattcggaagaaaaagtgacaccttggaattttgaagagattattgataaaaacaaatcagctcaggcttttattgaacgtatgactaatcaagatttgtatttgccaaacgagaaagtgctaccaaagcatagtcccttgtacgaaaaatataccgtctataatgaattgactaaaattaaatatgttactgaaacaggcacagctaaattctttgatgcgaatttgaaacaagaaatttttgatggtcttttcaagaaagaacgaaaagttactaagagaaaactgttaacgttcttagagaagaattttgatgagtttagaattgttgatatccaaggcttggataaggaaactgaaacatttaatgcctcttatggtatctatcaggatctattaaagattattaaagataaagcgtttatggacgattctgaaaacgctgatattcttgaagatattgttcttacattaacactcttcgaagacagagaaatgattaagcaacgattggcaaaatatgcggacttgtttgataaaaaagtgattgataatcttgcacgccgtcgctacacgggctgggggcgtttgtcagcgaaattactcaacggaattcgagataaacgatcacgtaagacaatcatggattatttagttgatgatggtcgttcaaatcgtaatttgatgcagctaattacggatgataacttaacgtttaaagatgagattgcgaaggctcagtatagtgataatagcgatgatttgcatcaagttgttcaagatttagcaggcagtcctgctattaaaaaaggcattttacaaagtgttaagattgttgatgaactggtgaaagtcatgggatacgaaccagaacaaattgttgttgaaatggcacgtgaaaatcaaacgacggccaaggggcgtcgcaattcacaacaacgttataaacgacttgaggaggcaataaaaaatcttgaccgcgatttaaattataaaattttaaaagaacatccaacagataaccaagctttgcagaatgatcgtcttttcctgtattatctccaaaatggccgagatatgtatactggtgagtcattagatattaatcgtttaagtgactatgatattgaccatattattccgcaggcctttattaaggataattcgattgataatcgtgttctagtctcgtcagctaaaaatcgtgggaagtcagatgatgtaccaagtgaagatgttgtcaataggatgagaccgttttggaataaattgttgaactgtgggctgatttctcaacggaaatacagtaatttaaccaaaaaagaattaacaccaaatgataaggctggctttatcaagcgtcaattagttgaaacacgtcaaattactaaacatgtagcacgtattcttgatgaacattttaataaagaatttgatgaagataagaaacggattcgtaaggtcaaagtagtcactctaaaatccaatctggtatctaacttccgtaaggagtttgaactctataaagtgcgtgaaattaatgattaccatcatgcgcatgatgcttatcttaatgcagttgtggctaaggctctcctaatgaaatatcctaaactggaaccggaatttgtgtatggcgagtatccaaaatataatagctaccgagaacgtaaaacggcaactcaaaggatgtttttctattctaatatcatgaatatgttcaaatccaaagtcaaactagcagatgagcgaattattgaacgtccgatgattgaagtgaatgatgaaacaggagaaattgcctgggataaaacaaagcatatcgctactgtcaaaaaagttctctcctatccacaaatcaatattgtgaagaaggtagaggaacagacaggtggattaacaaatgaaacgatatatccgcgtggtagttttgataaattattgaatcggaaaaatactttagaagctagtaagtatggaggatttggcagtccaacagtagcttattgcgttttagtagttgcagatagtaaaaatgagaatggcaaggtaaagaaattaaaattaggttctgaattgcttggtattacaattcttgaaaaaaatgattttgaaaataattccttagattttttaagtagaaaaggatatcaaggagttcaagagaaaaagataatcaagttacctaaatatagcctatttgagttccaagacggtagtaggagaatgctatcaagtgttatggctaatgataacaaacgtggagatctgcaaaaagcaaatgaaatgattttgccagcttatcttgtgaaattgctttatcatgctaaacatataaatagcgttggagagccagctcataaaaactatataaacgagcattgctctgagtttcaagatttattgaattatattaggcagtttgcggataagtttgttgatgtagataaaaatttaagtaaaataagatctctttctaaatctatggcagagtattccgtgagtgaaatctgtagttctttcgttaatttattaacattaacagcattgggtgcaccagcagactttaagttttttgggacaacaataccgaggaagcgatatgggtcacctcagtccattctctctgccaccctcatccaccaatccatcactggtctttacgaaacgcggattgatcttagtaaattaggagaagactga

SEQ ID NO: 41 - DNA, 4038 bp, Listeria monocytogenes
  source 1..4038: mol_type = unassigned DNA
atgcaactaaaaattattgaagggatgaaaaaaatgaaaaaaccgtacacgattggactagacataggaacaaactcggttggatgggcagtgttaacagatcaatatgatttagtgaagaggaaaatgaaaattgctggagactctgagaaaaaacagataaagaaaaatttctggggagttagactatttgatgagggtcaaacggcagctgatagaagaatgactagaacagctagaaggagaatagagagaagacgcaatcgtatttcgtatttacaagggatatttgcggaagaaatgtctaaggtggatgcaaatttcttttgccgattaagtgatagcttttatgttgataacgaaaaaagaaatagtcgtcatcctttttttgcgactatagaggaagaagtagaataccacaaaaactacccaaccatttatcacctgagagaagaactcgttaattcttcagaaaaagctgatttaagattagtttatttagctttagctcatattataaaatatcgagggaactttttaattgagggagcattagatacccaaaatacttctgttgatggaatatataagcaatttatacaaacatataatcaagtgtttgcaagtggcattgaagacggttcgctaaaaaaattggaagataataaggacgtagctaaaattctcgttgaaaaagttacgcgaaaagaaaaacttgagagaattttaaaattataccctggtgaaaaatctgccggaatgtttgctcagtttatcagcttgattgtaggcagtaaagggaattttcaaaagccttttgatcttattgagaaatcggatattgaatgtgcgaaagatagctatgaagaagatttagagtctttgttagcgctaattggagatgaatatgcggaactttttgttgcagcgaaaaatgcatatagtgctgtggtgttatctagtattatcacagtggctgaggctgaaacaaacgcgaagttatccgcaagtatgattgaacgttttgatacacatgaagaagatttaggggaattgaaagcatttatcaagctccatcttcctaaacactatgaagaaatatttagtaataccgaaaaacatggttacgcaggttatatagacggtaaaacaaagcaggcagacttctataaatacatgaaaacaacattagagaacattgaaggcgccgattattttattgctaaaatagaaaaagaaaactttttacgaaaacaacgaacctttgataatggggctatcccgcatcaattacatttagaagaattagaagctattttacaccagcaagcaaaatattatccttttttaaaagaaaactatgataaaatcaaaagtttagtaacttttagaattccatattttgttggtccgctagctaacggacagagcgaattcgcatggttaacaagaaaagctgatggtgagattagaccgtggaatatagaagagaaagtggatttcggtaagtcagcggtcgatttcattgaaaagatgaccaataaagatacatatttacctaaagaaaatgtattgcctaaacacagtctctgttatcaaaaatatttggtttataatgagttaaccaaagttagatacattaatgaccaagggaagactagctatttttctgggcaggaaaaagaacagatttttaatgacttatttaagcaaaagcgtaaagttaaaaagaaggatttagagctgttcttacgcaatatgagccatgttgaaagtccaactattgaaggcctggaagactcgtttaattcaagttattctacctatcatgatttactcaaggtagggataaaacaagaaatccttgataacccagtaaatacggaaatgctagaaaatatagtcaaaattttaactgtgtttgaagataaacgtatgattaaagagcagttacagcaattttctgatgttttagatggggttgttttgaaaaaattagaacgacgacattatacaggatggggaaggttatcagctaagttattaatgggaattcgtgataagcaatctcacttaactattttagattatttgatgaatgatgatggacttaatcgtaatctgatgcaacttataaatgacagtaatttatcatttaaatcaataattgaaaaagaacaagtaactacagcagataaagatattcaaagtattgtggcagaccttgctggtagcccggctataaaaaaaggtattctacaaagcttgaaaattgtcgatgaacttgttagtgtaatgggctacccacctcaaactattgttgtggaaatggcaagagaaaatcaaacaacaggaaaaggaaaaaataattctagaccacgttataaatcattagaaaaagcgattaaagaatttggtagtcaaattctaaaagagcatccgactgataatcaagaattaaaaaataatagattgtatttgtattatttacagaatgggaaggatatgtatactggacaagagttagatattcataatctttctaactatgatattgatcatattgtgccacagagttttataacagataactccattgataatcttgtgttaacgagttcagctgggaatcgggaaaaaggggatgatgttccaccactagagatcgttcggaagagaaaagtattctgggagaagttataccaagggaatttgatgagtaaacgtaaatttgattatttaactaaagctgaacgtggtgggcttacagaaacggataaagcgagatttatccatcggcaattagtggaaactcgtcaaataacgaagaatgtagctaatattttacatcaacgttttaattatgaaaaagacgatcatggcaatactatgaagcaagttcgaattgtaacattaaaatctgcgctggttagccaattccgtaagcaatttcaattgtacaaggtgcgagatattaatgattatcatcacgcccatgatgcttacttaaatggggtagtcgcgaatacgttattaaaagtatatcctcaattagagccggaatttgtttacggcgattaccatcaatttgattggtttaaagcgaataaagccacggcgaaaaaacaattctatacaaacatcatgttattctttgcacaaaaagatcgaataatagatgaaaacggtgaaattctttgggataaaaaatatttagatactgtcaaaaaagtcatgagttatcgacaaatgaatattgttaagaaaacagaaattcaaaaaggagaattttcaaaagctacaattaagcccaaaggaaattccagtaaattaattcctagaaaaactaattgggacccgatgaaatatggtggtcttgatagccctaatatggcatatgcagtggttattgaatatgcaaaagggaaaaataaattagttttcgagaaaaaaattatccgtgttactatcatggaacgtaaagcatttgaaaaagatgagaaagcctttttagaagaacaaggttatcgtcagcctaaagtcctcgcgaaattaccgaaatatacgttatatgaatgtgaggaaggacgtcggagaatgctggctagtgctaatgaagctcagaaaggaaatcagcaggtattgccaaaccacctggtaacattactacaccatgcggcaaattgtgaggcaagtgatgggaaaagccttgattatattgaaagtaatagagaaatgtttgctgaactactagcgcacgtatcagaatttgccaaaagatatacgttagctgaagctaatctaaacaaaattaatcagctttttgagcaaaataaagaaggtgacatcaaggcaattgcacgatcttttgttgatttaatggcattcaatgcgatgggtgctccggcaagttttaaattttttgaaaccactattgagcgtaaaagatataacaatctaaaagaactattaagctccaccataatctaccaatcaatcacaggactatatgaatcacgaaaaaggctggatgactaa

SEQ ID NO: 42 - DNA, 4098 bp, Lactobacillus sp.
  source 1..4098: mol_type = unassigned DNA
atgacaaaattaaatcaaccatatggaattgggcttgacattggatccaactcgattgggtttgcggttgtggatgcgaatagtcatctcttgcggctgaaaggagaaacggccatcggtgcacggctatttagagaggggcaatcagccgctgatcggcggggaagtcggacgactcggcggcgtttgagtcgaactcggtggcggttaagctttttacgcgatttctttgccccgcatattacaaaaattgacccggatttctttttgcggcaaaagtattccgaaatttcgcctaaagacaaagacaggttcaagtatgaaaagcgtctgtttaatgatcgaacggatgctgaattttacgaggactatccgagtatgtatcacttgcgtctgcatttgatgacgcatacgcataaagccgatccgcgtgagattttcttggcaatccatcatattttaaaaagtcgcgggcattttttgacgccgggtgctgctaaagactttaatacggataaagtcgatttagaagatatttttcctgccttgacagaagcatatgcgcaagtttatcccgatcttgagttaacttttgatttagcaaaggctgatgacttcaaggcaaaactgctggatgagcaagcgacgccgagcgatacccagaaggccttggtgaaattgttattaagcagtgatggtgagaaagaaatcgtcaagaaacgcaaacaagtgctgacagagtttgccaaagcgatcacagggctaaaaaccaagttcaatcttgctttaggtacagaagtagatgaagctgatgcgtcaaattggcaattctcgatggggcagctggacgacaagtggagtaacatcgaaacttccatgaccgatcaaggaacggaaatatttgaacaaattcaagaactttatcgagcacgattgctaaatggcattgtgccagcggggatgagcttatcccaggcaaaagttgctgactatgggcaacataaagaagatcttgagctgtttaaaacctacctcaagaaactaaatgatcacgaattagctaaaacaattcggggtctttatgatcgatatattaatggcgatgatgctaagccttttttgagggaagactttgttaaagccttaaccaaagaagtaaccgcacacccaaatgaagtgtcggagcagctgttgaatcgaatgggacaggcaaacttcatgctcaaacaacgaactaaggccaatggtgcgattcctgttcaactgcaacaacgtgaactagaccagattattgctaatcaatccaaatactacgattggctcgccaaaccgaatccggtagagaagcatcgcgccagcaaaccatatcagttagacgaattattaactttccgaatcccttactatgtaggacctttgatcacgccaaaacaacaagccgagtcaggggaaaatgtcttcgcgtggatggtccgtaaaaatccttcaggcaatattaccccatacaattttgatgagaaggtggatcgtgaagcttcggcaaacacgtttattcaacgcatgaaaacgaccgacacttatttaattgacgaagatgtcttacccaaacaaagcctgttgtatcaaaaatatgaagttttgaatgagctgaacaatgtccgcattaataatgaagctctcagcacggatcaaaaacaacgcttgatccatgaagtgttcgagcggcatagcagtgtgaccattaaacaagttgttgataatttggttgctcatggagattttgcccaacgcccggagattcgcggactggcagatgaaaaacgtttcttaagttcgctttcaacttatcatcagttgaaagaaattttgcatggggcaattgatgactcgacaaaattgcatgatatcgaaaatattattacgtggtcgacggtttttgaagatgccgcaatttttaagaccaagttggccgaaattgattggttggatccagcgacaatcaagaaattaagcaacatccgttatcgtggctggggtcagttctcgcgcaagcttttagatgggttgaaactaggcaatggccacaccgtaattcaggaattaatgctttcgaatcataacttgatgcaaattttggccgatgaaacattaaaagaaacgatgacggaattgaatcaagacaaactgaagacagacgacattgaagatgtgatcaatgatgcgtatacttcgccaagcaataaaaaagctttgcgccaagtgttacgggttgttgaagacatcaagcatgcagcaaacggtcaagatccaagttggctgtatattgaaacggcagacggaacaggtactgctggcaagcgcacccagtcacggcaaaagcaaattcaaacagtttacgctaatgctgcccaagagctgattgatagtgctgtccgcggtgaattggaggataagattgcagacaaggccagctttaccgatcggctagtcctttatttcatgcaaggcgggcgcgatatttataccggcgcaccgctaaatatcgatcaactcagccattatgacatcgatcacatactgccacaatcgttgatcaaggatgactctttagataaccgtgtgctcgttaacgccaccattaaccgcgaaaagaacaatgtatttgcttcaactttgtttgcaagcaagatggcagcaacttggcgtaagtggcacgaagctggtctaatcagtgggcgtaaactcagaaacttgatgctgcgtcctgatgagaccgataagtttgcgcacggatttgtcgcgcgtcaattggttgagacacgtcagatcattaaattaaccgaacagattgccgctgctcaatatccgaacaccaagatcattgcagtcaaagctggcttatcccaccaactgcgcgaagaactagattttccaaagaatcgtgacgtgaaccattatcatcatgcatttgatgccttcttagcagcgcgaattggcacgtatctgcttaagcggtatccgaaattggcaccatttttcacatatggcgaatttgcaaaagttgatgttaagaagttccgcgaattcaacttcattggtgcactgacacatgctaagaagaatattatcgctaaagataccggcgagattgtttgggataaagaacgtgatatccaagagctggatcggatatacaacttcaagcggatgctgataacgcacgaggttcattttgagacggctgacttattcgaccaaacaatttatgcggccaaagactccaaagaacgcggtggaagaatgagcttaatccccaagaaactaggctatctgactgggatttacgggggatatcagacggagcggggaagctatgtaagcattattagaacctttaaaaaaggagagaccatttacaaagtagttaatattctcacggcagatgtatcgttactttctgaaaaggagaaggtttcaaaaaccctggccgatatttatttgaaagagttgattgcaaaaaagctatcaaaaggtaaatccgggaaaaacattgcaagtgaaccttttgagatcgttttacctcgggtcggaaaagactccctttttaaaaacaaaaagtatggtttgttcttaatagaatctgcaacagagcttcacaattatcaggagttgtggttaccaagaaatgaccaattgctgataaaaaggatacaagctcgtcaaatcgaagaatcaaaagcagactatgaattgaccaggatgtatcgcaatattgcatggcaggttgatcattatttcagactctacaagataagaaaatttgcagagaagttacaagcaagtgtggaggactttgcgggtttaccggtctataaaaatgaaacttccgatgggaaagtcgaagttcttgcgtctgtgctgaaaagacttaacggggccgcggataagggaagaaccaatccgacaacggtcaagttacagtcggatttcgggagaacgcttttaactaacggaatagttcttgaagacgattcaagtattgtctatcaatcaccgacaggactttttaaacgaagtgtaaagttagttgacttgtaa

SEQ ID NO: 43 - DNA, 4101 bp, Pediococcus acidilactici
  source 1..4101: mol_type = unassigned DNA
atgggtgacagaaagtataaccttggtctcgatatcgggacgtcatcaattggctttgcggcagttgacgaaaataaccaacccattcgagttaaaggaaagacggcaattggggtacgcctctttgaagagggcaaaacggcggcggatcggcgtggttttcggactacgcggcggaggttatcccggcgccggtggcggatcaatttattaaatgaaatttttgatgcgcaccttgccgaggtggaccccacctttttggcccggttaaaagaatcgaaccggtcaaatttggatccaaagaagtcttttcaaggctcacttttattcccagaacggaaagattatcaattctatgaggaatatcccacgatttaccatttgcgaaaagcattgatggaagaagatcggaagtttgatattcgggaaatttatttagcagtccatcacattattaaataccgtggaaacttcttaaacggaacgccgatgcggtcgtttaaagtagaaaacatcgaactggatactttgtttgaccagttaaaccaactttacgcggaaattgttcctgataatgagctggcctttgatttagcacaagtggcggatgttaaggacgttcttagcagcacaaccatctataaaatggataagaaaaagcaactagtgaagatgatgctgcttcccgcaagcaacaaggcgttacagagcgaaaacaagaagatcgttacgcagtttgttaacgcgattttgaactataagttcaagcttgacgtgctcctccaagttgaaacggacgcggactggtccttgaagttaaacgacgagggggcggatgataaattagaagaattcacgggagatctagatgaaaatcgtttggaaattattgatcttttgcaaagactacataactggttttcactaaatgaaattacgaaggatggtaattcgttgtccgcggcgatggttgaaaaatatgaaaaccaccatcaccatttaggattattgaaaaaggtgattgagaatcatccggatgctaagaaagcaaaagcactgaaggaaacgtacacggcctacgtcggtaaaacggacgataagacccagaaccaagatgatttctataaggctgtggaaaagaacttagatgattcgccggatgcaaaagaaattaaacgtttaattcagctagaccagttcatgcctaagcaacggactgggcaaaatggggcaatccctcatcaactgcatcaacaggagctcgaccaaattattgaaaagcaatctaaatactatccatttttggcggagccgaatccaaacgttaagcgccgtaaagatgctccttacaaactagacgaattgattgcctttaagatcccgtattacgtgggcccgttggtaacgccggaagaacaagcacaaaataaagaaaacgtgtttgcgtggatgaagcgaaaggctgccggtccaattacaccatggaattttgatgaaaaagttgaccgaatggaatccgcaaaccgatttattcggcggatgactaccaaagatacgtatctttttggcgaagatgtcttacctgcggaaagtatgatttatcaaaaatttgtggtgcttaatgaactgaacaatttgaaaattaatgggcggcatttgtcacttaaggataagcaagacgtttataatgacttgtttaagcaacaaaaaacggtttccattaaagcgctccaaaattactacgttaccaagaagaaagccgcaaccgcgcctaccgtgggcggattggccgatccaaagaaatttttatcgagtttatcaacttatattgatttcaaaaatatgtttggggagcgggtaaatgatccgcaatttcaagaggacttagaacaaatcgtggaatggtcgacaatttttgaggatcggggaatcttcaaggcaaaattacaagccctgggttggctatctgaaaagcagattcaacaactggtggctaaacgttacaaaggatggggtcggctttccaagaagctcttaactgggctaaagaacgcggaaggatactcaattttagacgaaatgtggcgttcgaccgaaaacttcatgcaaattcaaactcgcccagaatttgcggcactgatccaacaggccaacgaaaagcaatttgagggcaacgatccgaataatgtttgggagaatattgaaagtattttgggggatgcgtacacttcaccacaaaataagaaggcaatccgtcaagtggtgaaggttgtccaagatattgaaaaagcagtgggtaacccacctgaaaaaattgcgattgagtttacccgtgaagccgcggcgaacccccaacggacgcaaagccgtttgcggaccttggaaaaactttatgaaagcgccgaagaagttgtagacgcggggttaactgctgaactagctgaattcaaggaaaataagcacgttttatcggataagtactacctgtactttacccaattaggccgggatgtttatactggcgacactattagtctagataagttgaacgattacgatgttgaccacattttgccacaatcctttattaaggatgatagtttggacaaccgggtattgacgattcgggcggttaacaacggaaaaagtgataatgtaccagctaaaatgtttggcaaaaaaatgggctcattttggcggtacttgctggataacggaatgatttccaaacgaaaatataataacttaattaccgatccggataatattagtaaatacgcccaaaagggatttattaaccggcaactcgtggagaccagtcaagtcatcaaactgacagctaacattttaaatggaatttacgataaggacaccgaaattatcgaagttccagcaaaaatgaattctcaaatgcggaaaatgtttgatttggttaaggtgcgggaagttaacgactaccaccatgcctttgacgcttatttaaccatctttattggaaaatatttgtataaatgttatccaaaattacggccatactttgtttatggcaagttcaaaaaatttggtgacaatgaagatatcgaagttggagacggacggtttaactttttgaatcggatcgaacggttgaaaaatgttacagatcctgagaccggtgaaatcttgtggtcaaacgtggcaccgaatgagaccatcaaacagattaagaaggtttacaactataaatttatgcttgtttctcgggaaaccaccactcgaagagcagaattatttaaccaaactgtttacccaaagaattatcgtggaaaactaattccgattaaagaagaccggcctacggatttatatggtggttatagtggaaatacggacgcctatcttgcaatcgttgccttagaagataaaaagaagggcaaatatttcaaggtggtcggaattccaactcgggcggctgccaaattagagaagttaaagcaacaagattcacagcagtatttacaggcgcttcataaagttatcgcgccacaatttacaaagagcactaaaaagggaatcaagaaaacagaattcgagattgttctagataaagtgcactaccggcaattagttcaagatggtcccgttaaaatgatgctaggcagttcgacatataaatataatgctaagcaactagttttgtcagaaaaagctctacaagtaattgcggatgaccgaaaatttgatgagacgcagaaagacgataatttaatcgcagtttacgatgaaatcttatcaattgttaatcaatcttttgatttatacgatatcaacggtttccggaagaaattaaatgataatcgggatcaatttattgatttgccagctgaaaccaagtatgaaggacgaaaagtagttgcccacggtaagcgtgaaatgattttagagattttgaagggattgcatgctaatgcggcttttggaaatttgaaaccaattggtttttcaacagcatttggacaattacaagtaccaaatggaattattttatctaaaaacgcaatcttaatccaccaatcgccatcaggattattcgaacgtaaaattaaattaagcgatctttaa

SEQ ID NO: 44 - DNA, 4077 bp, Acidaminococcus sp.
  source 1..4077: mol_type = unassigned DNA
atgggaaaaatgtattatcttggtctggatataggaacaaattctgttggatatgccgtaaccgacccatcgtaccatttgctcaaatttaaaggcgaaccgatgtggggtgcccacgtgtttgctgcggggaatcaatcagctgaacggagaagctttcgtacgagccgcagacgccttgaccgcaggcaacagcgtgtcaaactggttcaagaaatctttgctcccgtgattagtcccattgatccacgtttttttatcagacttcatgagagcgctttatggcgggatgatgtggctgaaacggataaacatattttctttaatgacccgacctatacggataaggaatattattctgactatccaaccatccatcatctcattgtggaccttatggaaagcagtgaaaagcatgacccgcggcttgtttatttggctgttgcctggctggttgctcatcgtggtcatttcctcaatgaagtggataaggataatattggggatgtcctgagttttgacgccttttatcctgagtttctggcatttctttccgataatggggtgtcaccttgggtatgtgagtcaaaagcactccaagcgaccctgctttcacgaaactccgtcaacgataagtataaagccttgaagtctctgatctttggcagccaaaagccggaggataattttgatgccaatatcagtgaagatggacttatccaacttttagcaggaaaaaaggtcaaggtcaataaactttttcctcaagaaagtaatgatgcttcctttacactcaatgataaggaagatgcaattgaggaaatcttaggaacgcttacaccggatgagtgtgaatggattgcgcatattaggaggctgtttgattgggccatcatgaaacatgctctcaaagatggcagaacaatctccgaatcgaaagtaaagctctatgaacagcatcaccatgacttgacacagctcaagtattttgtgaagacctatctagcaaaggaatatgatgacatttttcgaaacgtagatagtgaaacaaccaaaaactatgtcgcatattcctatcatgtaaaagaagtcaagggtacattgcccaaaaataaggcaacccaagaagaattttgcaagtatgtccttggaaaggtaaagaacatcgaatgcagtgaagctgataaggttgattttgatgaaatgattcagcgtcttacagacaattcctttatgccgaaacaagtatcaggtgaaaacagggttatcccttaccagctttactattatgaactaaagactattttgaataaagccgcttcttatctgccttttttgacccaatgcggaaaagatgccatctccaatcaagataagctcctttccatcatgacctttcggattccgtatttcgttgggcccttgcgcaaggacaattcagagcatgcctggctggaacgaaaagcagggaaaatctatccgtggaattttaacgacaaagttgaccttgataaaagtgaagaagcgttcattcggagaatgacgaatacctgcacttattatcccggtgaagatgttttgccacttgactcccttatttatgaaaaattcatgatcctcaatgaaatcaataatatccgaattgatggttatcctatttctgtagatgtaaaacagcaggtttttggcctctttgaaaagaagagaagagtgaccgtaaaggatatccagaatctcctgctttccttgggtgccttggataagcatggtaaattgacgggaatcgatactaccatccatagcaattacaatacataccatcattttaaatcgctcatggagcgtggcgttcttactcgtgatgatgtggaacgcattgtggagcgtatgacctatagtgatgatacaaaacgcgtccgtctttggctgaacaataattatggaacgctcactgctgacgacgtaaagcatatttcaaggctccgaaagcatgattttggccggctttccaaaatgttcctcacaggcctaaagggagttcataaggaaacgggggaacgagcttccattttggattttatgtggaataccaatgataacttgatgcagcttttatctgaatgttatactttttcggatgaaattaccaagctgcaggaagcatactatgccaaggcgcagctttccctgaatgattttctggactccatgtatatttcaaatgctgtcaaacgtcctatctatcgaactcttgccgttgtaaatgacatacgcaaagcctgtgggacggcgccaaaacgcatttttatcgaaatggcaagagatggggaaagcaaaaagaaaaggagcgtaacaagaagagaacaaatcaagaatctttataggtccatccgcaaggattttcagcaggaggtagatttccttgaaaaaatccttgaaaacaaaagcgatggacagctgcaaagcgatgcgctctatctatactttgcgcagcttggaagggatatgtataccggggaccctatcaagttggagcatatcaaggaccagtccttctataatattgatcatatctatccccaaagcatggtcaaggacgatagtcttgataacaaggtgttggttcaatcggaaattaatggagagaagagcagtcgatatcctcttgatgctgctatccgtaataaaatgaagcctctttgggatgcttattataaccatggcctgatttccctcaagaagtatcagcgtttgacgcggagcactccctttacagatgatgaaaagtgggatttcatcaatcggcagcttgttgagacaagacaatccacgaaggccttggcaatcttactaaaaaggaagttccctgatacggagattgtctactccaaggcagggctttcttctgattttcggcatgagtttggtctcgtaaaatcgaggaatatcaatgacctgcaccatgcaaaggacgcatttcttgcgattgtaacaggaaatgtctatcatgaacgctttaatcgccggtggtttatggtgaaccagccctattccgtcaagaccaagacgttgtttacgcattctattaaaaatggtaattttgtagcttggaatggagaagaggatcttggccgcattgttaaaatgttaaagcaaaataagaacactattcatttcacgcggttctcttttgatcgaaaggaaggcctgtttgatattcagccactaaaagcgtcaaccggtcttgtaccaagaaaagccggactagacgtggtaaaatatggtggctatgacaaatcgacagcagcttattatctccttgttcgatttacactagaagataaaaagactcaacataaattgatgatgattcctgtagaaggcttgtataaagctcgaattgaccatgataaggaattcttaacggactatgcacaaactacaatcagtgaaatcctacaaaaagataaacaaaaggtgataaatataatgtttccaatgggaacaaggcacattaaactgaattccatgatttcaatcgatggtttttatctttccattggaggaaagtctagtaagggaaaatcggtgttgtgtcatgctatggtacctcttattgtacctcataagatagaatgttatattaaggcgatggagtcttttgcacgtaaatttaaagaaaataataaattaaggattgtggaaaagtttgataagattacggtggaagataacttgaacctatacgaactatttttacaaaaacttcaacataacccatataataagttcttctccacacaatttgatgtgctgactaatggaagaagtacatttactaaattatctccagaggaacaagttcaaacgttattgaatatcttatcaatttttaaaacttgtcggagctctggctgcgatttaaaatccattaacggttctgctcaagctgccagaattatgatcagcgcagatttaactggactctcaaaaaaatattccgatattcggcttgttgagcaatcagcatctggactttttgttagtaaatcacaaaatcttttggagtatttatga

SEQ ID NO: 45 - DNA, 4191 bp, Lactobacillus sp.
  source 1..4191: mol_type = unassigned DNA
atgacgaaaagaatagatgattatattctggggctcgatatcgggaccaactcttgcggctgggccgtgactgataagaaaaataacttattaaagctcagagggaaaacagcaattggttcacatttatttgacgaaggacacactgctgctgagcgtcgcagttttagaactaccagaagacgacttaagcgtagaaaatggcgcttaggattgctggaagaaatatttgcggaaccaatggctaaggtagatccgggattctttgtgcgcctgcatcaatcatgggtttcgccacttgataaagatcgcaaaaagtatcaggcgattgtgtttccaactgctaaggaagatcaggcattttataaacattatgctacaatctatcatttgcgtgatgaattgatgacgcaagaccgtcaatttgatttgcgggaaatatttttagccatccaccacattgttaaatatcgcggtaattttttacaagatactcctgttaaagattttgaagcttccaaaattgaagtgggacccattttatcgcatatcaacaacgcttttgcggaaaagatagttgaagagcaagatcctattgaattaaatgtcgcaaacgctaccgatattgaggctgttatacggggtaaagatgcagaaaagaccgtttataagatggacaaggtcaagaaaattgccaagttattaacggattcaactgccaaggaagaaaaaaatttagccaagcagattgctaatgctattatgggctacaaaacgcaatttgaaactatcttaggcaaagaaatcgataaaagtgacaaggcgcaatgggaattcaaactgactgatggggatgccgatgataagcttgatgcattactgccagaccttgatgaaactgatcagactattattgccgaaattaaaaagctgtttagtgcaattactttaagtactattgttgatgaaaacaagagcttatcacagtcaatggtggccaaatacgacaaacatcaccaagattataagttgttaaaagcttatatcgacactttgcaggatcgcagtatagctaaaaagttgcttttagcctatgatttatacgttaataatcgtcatggtcgtttgctggaagccaaaaaaacatttgaagataaaaaaaagaaaaaagctttaaccaaagatgaattttataaaatagttaaggataatcttgacgattccgatcttgctcatgaaatacggcaagaaatagctgcagataacttcatgcctaagcagcgaacaaacagtaatggtgtaattccgtttcagctgcatcaaatcgaactagataagattattgctaatcaaagccaatattatccattcttagctgcagaaaacccagtagaagatcaccgtaaacaagcaccttacaagttagatgaactggttagattcagagtaccttattatgtaggtccgatgattacagccgatcaacagaaaaaaacttccggtaagagttttgcttggatggtcagaaaagaagatggtcagattacgccttggaattttgaacaaaaagtagaccgtcaagaatctgccaacaagtttattaagcgcatgactattaaggatacttatcttttaggtgaagatgttttgccagctaatagtttgctttatcaaagatttgaagttctaaatgagcttaataatattagaatcaatggtagtagaatcagcgtcgaccttaagcaacaaattttcaatgatctttttgaagaaaagaaaactgtcacagaaaaatctttgacaagttatttgaagcaaaatctccatttgccaactgtagaaattaaggggctggcggatccaactaaatttaattcaagtcttgcgagttattatcacctcaaaagcttacatgtgtttgataaggaattagcagatccacaatatcaaaaagactttgaaaaaataattgagtattcatctatttttgaagataaaaagatctttcaagataagttgcatgctgaatttaaatggttaacacctgaacagtttaaagctatttcaacttggcgcttgcaaggctggggtagattatcacggaagctccttgttgaattgcatgatacaaatggccaaaacattatggaacaactgtgggatagccaaaagaacttcatgcaaattgtgacagaaccagattttaaagaagcaattgctaaggaaaaccaaaatgttactcaagcaaatggtgttgaagagattttggctgacgcctatacttctccagctaacaaaaaagctataaggcaggtcgtcaaagtagtagctgatgttgtaaaagcagcaggtggcaagaaacctgcacaatttgcgattgaatttacacgcgaacctgataaaaatccaaagttgtcacatattcgtggcactaaattgctcaaagcatatcaggaaactgctggcgaactagtggatcagaagttaacggatagcttaaaggaagcgatgaccagtcgtaaattgctaaaagataagtactttttatactttatgcaggctggaagggatgcatatacggggcaaaaaattaatattgatgaagtatcgacaaattatcagattgatcatattttgccacagtcatttattaaagatgattcctttgataacagagtattaactgctactccgctaaatgcagaaaaatcggatgatgtaccttataagcgcttcgccaataattatgtttcagacctgaagatgacagtaggtgaaatgtggaaacactggcagaaggatggcattattaataagcataagctaggtaatttgctacttgatccagatagattaaataaatatcaaaaatctgggtttattaacagacagttggtagaaacaagtcaaatagtcaaattagtgtcagttattttgcaaaataaatatccagattcagaaattattacggttaaagcaggagataactcggctttgcgtcaacgtctaaacttatataagagtcgtgaagtaaatgactatcaccatgccattgatgcctacctctcaattatttgtggcaactttttgtaccaggtttatcctaagtatcgtccatactttgtttatggcaagtataaaaagttcagtcaagacccggacttgcagaaggaagttatcaaacacttcaagggctttacgtttatgtggccattattgcaaaaggataattctgagcgtaaagctccagaaaaaattaaagaaaataatagtgatcgaattgtcttttacaagcatcctgatatttttgataaattacgtaaagcatacaattataagtatatgctggtttcaagagaaacgaatactgaaaatagtggcctttttgatgtaactatttatccacgcggtgaacgtgaccttgcgaagactagaaagctgattcctaaaggtaatggactcgatccgaaaatttacggtggctatagcggtaacagtggtgcatatatggtaattgtcaaaattgagcaggcaaaaaaatctatttataaagttattggcgttccgatgcgcactcttgcaagtttaaaccaggctaaaaaacaaggaaactatcaaggagaactccacaaagtacttgagccgcagattatgtttgataacaaagggaaacctaaacgtggtgttaaaggctttagagtaataaaagatcatgtaccatttaagcaagtggtcttagacggtgacaaaaagtttatgctttattctgatcaatatgaagctaatgccaaacaactgacgctttctcaggagactatgcgaatagtgacagacaacttgaaaaagggcgaggatcaagatcaattactagtagaagcatatgatgagattttgcaaaaagttgatcaatatttaccactttttgatatgaaaggttttagaaatggtttgcataagggtagagataaatttattgaattatcaactaatgataagaaatctactttgagtaatattttaaatggcttacatgataatatggtagaaataaaaatggaatatttgggtataaggactccatttggacgtttgcaatcaagttctggtatcaatttatcaccagatgcagtactaatttatcagtcaccgactggactttttgaaaaacgggttaagatagccgatttataa

SEQ ID NO: 46 - DNA, 4188 bp, Treponema putidum
  source 1..4188: mol_type = unassigned DNA
atgaaaaaagaaattaaggattattttctcggattggatgtaggaaccggatcggtgggttgggcagttactgatactgactataaactcttaaaggctaatcataaagacctttggggaatgaggtgttttgagacggcggaaactgctgaaaaacgcaggctatttcggggggcgcgccgccgcattgaaaggaggagaaaaaggataaagctgcttcaagaacttttttcccaagaaattgcaaaaatagatgaagattttttccaaagaatggaggaaagccctttctatgcagaagacaagactatattacaagaaaacactctttttaatgatagagattttaccgataaaacataccataaagcctatcctaccataaaccatctgataaaggcttggattgaaaacaaggtaaagccggatccacgattattatatttagcctgtcataatattataaaaaaacgaggacattttttatttgaaggtgactttgattctgaaaatcaatttgatacctctgtacaagctctttttgagtatctgcgtgaggatatggaactcgatattgatgccgatagcaaaaaaataaaagagattttaaaggatagcgctttaaaaaattccgataaacaaaatcggctaaataagcttttagggctgaaatcttccgacaagcaaaaaaaagctcttactaatttaatatccggtaacaaggcaaactttgccgatctttatgataatcccgatttaaaggatgcagagaaaaatagcatatctttttctaaagacgattttgatgctttaagcgatgaacttgcttccgttttaggagattcttttgagcttttgttaagagcaaaggctgtatataattgctcggttctttccaaagtaataggagatgaacagtatctttcttttgcaaaggtaaaaatatatgaaaagcataaaaatgatttgactaaactaaaagaagttgtaaaaaaatattttcctatagaatatcgaaatatattcggatataaacaatctgaaaataataactgtaattattcaagatatgtaggtgtgtgtaaaagcggaagtaaaaaaaaggttataaataaaactgcaagtcaagaagatttttataagtttttaaaagatattcttttaaaaagaagtgatgtgcctgaagcaaacggaatattaacagaaattgaaacaggaacctttctgccgaaacaaatttccaaaaacaatgcagaaattccttatcaattacgcaaaatagaattagaaaagatattaaccaatgcggaaaagtttttttcttttttaaaacaaaaagatgaaaacggtttatctcacagtgaaaagattataatgcttttaacatttaaaattccgtattatatagggcctataaatacttctcataaacagtattttcctgataggtcatgggtaataaaaaaagaaaatgctcctcaagagaagataactccatggaatttttttgatcatatcgataaggaaaaaacagctgaagcctttattacaagcagaaccaatttttgcacatatttaataggagaatctgttttacctaaaaattctcttttatattccgaatatacagttttaaatgaaataaacaatttacagattattattgacggaaaaaatatctgcgatgttaaactaaaacaaaaaatatacgaagagttatttaaaaaatataaaaaagttacacaaaaacagatttcaacttttattaaacacgaaggtatttgtaataaaacggatgaagtaattattttaggtattgataaagaatgtacatcttctttaaaatcatacatagaacttaaaaacatattcggaaaacaagtggatgaaatttcgacaaagaatatgcttgaagacattatacgatgggctactatctatgatgaaggagaaggtaaaacaatacttaaaacaaaaataaaagccgaatatgaaaaatattattctgatgaacagatcaaaaaaattctaaatcttaaactttcaggttggggtcgtctatcacgcaagtttcttgaatccattacatcagaaatacccggctttatcgaaccggtaaatataataacggcaatgcgtgaaactcaaaataatttaatggaattgctgagcagtaaatttaaatttaacgaaaacattaaaaaaataaattccggatttgaggataccgataaacgattttcatataacagtttggtaaagcctttatttttatcgccatcggtaaaaaaaatgttgtggcagactcttaaacttgtaaaagaaatatcgcatattacccaagctccgcctaaaaaaatattcatcgaaatggcaaagggtgcagaacttgagcctgcacggacaaaaacaagactaaaaattttgcaggacttgtacaatagctgtaaaaatgatgcggatgcttttagttccgagatacaatatcttttaggtaaaatagaaaatgaagataatttaaggcttcgcagcgacaaactttatctttattacacacagcttggaaagtgtatgtattgcggtaaaccgattgaaatagggcatgtatttgacacaagcaaatatgatatagaccatatttatcctcaatctaagattaaagatgatagtataaataaccgagttttggtatgcagcagctgcaataagaataaggaggacaaatatcctttgaagcctgaaattcaattaaaacaaaaaaaattttggaatttcttacaaagaaataactttataagtattgaaaaatttaaccgattaacaagaacgactccaatctcggatgacgaaacggcaaaattcattgcccggcaacttgtagaaacaagacaggcaacaaaggtagctgcaaaagtattagaaaaaatatttcctgaaacaaatatcgtttactctaaggctgaaaccgtatcaatgtttagaaataaattcgatattataaaatgcagagaaataaacgattttcatcatgcacatgacgcatatttaaatattgttgtcggaaatgtttataatactaaatttacaaataatccttggaattttataaaagaaaaaagagataatcctaaaattggcgatacgtacaattattataaggtttttgattatgatgtaaaaagaaataatatcacagcatgggaaaaagaaaaaacaattattactgtgaagactatgcttaaaaggaatacccctatttatacacgccaagctgcctgcaaaaagggagaactctttaatcaaaccattatgaaaaaaggattgggccaacatcctctaaaaaaagaatgtcctttttctaatatttcaaaatatgggggctataataaagtttctgctgcatattatacttttatagaatatgaagaaaaaggaaataagatacgaagcttagaaactatccctctatatttggaaaaggacattcaaaaaagtcaagatggattaaagggttacttaacagaccagctaggaaaaaaagaaattaagattttggttcccaaaataaaaatcaactcccttttaaaaattaacggcttcccttgccacataacaggaaaaacaggagcttcctttgttctaaggcctgctgttcaattttgctgttcaaatgatgaagttctttattttaaaaaaattataagattcaatgaaataagaagtcaaagagagaagatgggaaaaacaatttctccttatgaagacttatcctttagatcttatatcaaagaaaatttatgcaaaaagacaaaaaatgatgaaataggagaaaaggagttttatggctttcttcaaaagaagaatttagaaatctatgatatgcttttaataaaacataaggatactatttatagtaaaaggccgaattctacaactcttgatatgttaatcaaaggaagatatgagtttataaatttaaagcctgaagatcaaattagagttatgctggaaattctaaaattgttttgtactactagagaggtaatagatttaggattaatcaaaggtaaatctgaggccggggtcacaacattaggaaaaaaaatctcaaaccttgatagctgcattttaatttaccaatcaataacaggcatttttgaaaaaaggattgatttgttaaagatatga

SEQ ID NO: 47 - DNA, 4038 bp, Eubacterium sp.
  source 1..4038: mol_type = unassigned DNA
atgggtaacaaattgcggaatgtggatgattattatttaggacttgacatcggcaccgagtccgttggctgggcggtaaccgataagtactatgtcattccgaagttcaagggcaacgctatgtggggcgtacatctttttgacgagggagagacctcggtgaagcgcagaggcttcagaagcgcaagaagacgcactcagcgaaaaagggagcgcttagccttgctggaagcgctctttgatgaagaaatttgtaaaaaggactgcacctttttcagacgtttacacgagagcgacttgtggccggaggacaagtccggcgacgataaatacgctgtttttgcagacgaaaattataccgataaggatttccacaaggaatatcccacgatatatcacctgagatacgagcttattaaaaataaagagccgcacgatgtaaaacttgtctttttggctcttcaccatattatcaaaaacaggggacattttctctttgattccctgtcatcggcagaggactttaattcggcatacgaaactatgtgctcttatctcagtgataacgaaatacagcttaattgctccgatattgagcaatttaaagctatattaaaggacaggcgtcagggtaaaatagaaaagacgaagaatcttgcctcgcttttcggtataacaaaaaaatccgatcccgtttcttacgccgtaatggcggttttaagcggctcgactgttaaaatgtgtgatttgtttggcgatgatgaactaaaaaccgtagagaaaaacaatatatcttttgcaagcggctatgaagaaaacgaagaaatatacgcgtccgttttaggcgatcgctttgagcttgtcaaaattttaaaggctgtatatgattgggccgtactcgccgatattttggacggtaagaagtatatctccgaggcaaaggtcgccgtatatgaaaaacataaaaatgatttaaaaacgcttaaaaaatatgtcaaaacttatttaccggaaaagtataacgagatatttaaaataagcgacggcaaaaaagacaattatgtggcgtattccggtcacattaaggaaagcggcaaaacaggcgagcttaaaaagacctgtaattccgagaatttttgcgcttatcttaaaaagacgctcggcaaaaacgccgatttgtcatataaggaaatgtttgacgaaattgagaataagacctttatgccgaagcaggtgacaaagagcaacggcgtagttccgatgcaggtaaatgaggaagagcttaaagcaattttggataatgccaaggattatttgtcgtttttaaattcgtgcgatgaaaacggtgtttccgtgtacgataaaattatcaaaatatttgagtatcgcattccgtattatgtcgggccgcttaatactcataccgaaaacagctggcttaaaagaaaagacggcgtaaaaatatatccgtggaactttgacgacgttgttgatattgactcttcggctgagaaattcataaacaacctcacaagtaaatgcacctatttgccggagtgtgacgttattcccaaatgctctcttctctattcgaaattcaccgttctcaacgagataaacaatctcaaactgaacggcgaggatatacccgtcgaattaaagcaggggatttataaagatttgtttatgactcgccgcaaggttaccgtaaagcaaattaaggactatctcaaggcaagaggctgttatgataataacgacgtattgagcggaatagatacaaccgtaaaatcctcattgaaatcttattttgattttaagggttttgagagcctgacctttgatgacaaggagagtattattgcgtcatcggtaattttcggcgatgataaaaaattactcaagaaaaggctgaaaaagcttttccctgaaaagctgacggatgaagacatcaaaaaaatatgcaagcttaagtacaccggctggagccgcctgtcaaaggagtttttgtgcgatgtcgagtttacatataaaaagaccggtgaggttatgaatgtcatcacggctctttgggaaacgaattacaatttgatgcagattttatattccgaagatttctgctgtgacggcgatgaaaaaaagaatttaaatgacaagcttgatgagctcagctatacaggtgatcagcattctctgcgcaaggctgttgacgcgctttacgtttctccgaaggttaagcggccgatattgcgtgcgttgctgattgcaaaggaaatagaaaagatacaggaaaggcctccgaagaagatattcgtagaggttgcaagaggtattgataacagagaagaaagacacagggactcaagaaaaaacaggcttatggaattatacaaaaactgtaaaaaggaagccgaaaaattctgcccgtatttcgatgccctgagtaaaaagctgagtgatgaagacgagtcaaagctcagacgtgacaagctttatttctattatattcagctcggcaaatgtatgtatacgggtgaggaaatatccctcggcgagctgatgaacggtaacggccgctttgatattgaccatatttatcctcggtcgaagataaaggatgacagccttacaaacaaagtccttgtcaataaaacagtaaataacaataaaaccaatgtttatcccattgatgcggctatacagagcaaaatgagtccgtattggcagatgcttcgtagcagcggactgataagcgaggaaacctataagcgtcttacccgtaaaacgccgcttaccgatgatgagctctccgcgtttgtgtcaaggcagctcaccgaaactcagcagtctacaaaggccgttgcgcatatattggagcagctgtacccgaagccgaaaaccgaaatagtctatgttaaagcggctttggttcacgccttcaggcaaagcaacgatatgctcaagtgccgtgaggtgaacgatttgcatcacgcaaaggatgcttacctcaatattgttgtcggcaatgcatacaatgtaaaggtcactcataataaggtgaatttcataaaaggattgcaaaacaacgataaaggatataccgtaaatcccgaaaaatttttcagccacgatatacccggcgcgtggtcggttaaggacagtatgaataccgtccgcagatttatgaacaagaacaacattcgctatacaaggttcccgcgcaaaaagcaaggaggactgtttaaaatcaatcctttgaaaaaaggaaacgggcaggttccgctgaaggcttcgggcgcaagaagctgtattgaaaaatacggcggatacgataaagcgacctcggcatatttttcgtatgtggagtataccgacaaaaagggcaaagccgtgcgtcagatgttccccgtcaatctgtatgaggtgaaagaatatgaagccgatatgcagggctttgttacaagccgtatagccgaagcttcaaacgtaaaaattctgattccctgcgttaaatatgacgcctgcatatcctttgacggctgcagaatgtttataaccaaaaagaccggaaatcggataggatataagcccggaatgcagcttgttttgggatataaatatgaaaagtatataagaaatatcgaaaattacctgacaaagcataaggacagggagattattccgagggacaatatttcagcagaagaaaatattgagctttacgatatcttaacgggcaaaatgctaaatacggttttgagtgtaaaattcagcggcatcggtaaaaagctcgaaaaacgccgtgaaaaatttgtgctctgctcaccggaggagcaatgctgcgtcttaaatgaaattctgaaaatccttcacgccaatgtgttgtcgggagaccttagtcttataggtgaaagtcctaatacaggtactatgaagaccaatgctaagttctccgaaattaaagacgttcatagcataaagctaatcaatcagtcggtaacgggcctttttgagcaggaaatcgacctgctgaaataa

SEQ ID NO: 48 - DNA, 3720 bp, Bifidobacterium bombi
  source 1..3720: mol_type = unassigned DNA
atgtctcagcacaggcgctatcgaatcggcatcgatgtaggattgaattccgttggtttggcggccgtcgagattgatgccaatcacgataatccattggatgagattcctatcagcattctgaatgcgcagtcagtgatccatgatggaggggtggatccagatgaggcaaaaagcgctacatcgcggagagcaagcgcaggagtcgcgcgtcgaacccgaaggttgcataaaagcaaacgtcaacgtctcgcaaaactcgacgaagtcctgaacgaactcggataccctgtcgaagacgagtcgcaattccctgccggatcaaacccctacatcgcttggcaggtgcgtgcgaagctcgcggagacattcattcccgatgttgaaactcgcaaaaggatgatatccatcgcaatacgccatatcgcccgacatcgtggttggcgaaacccgtacagctcagtagccgatgcggaacgtatgtcacatactccctcaccgttcatggtcgagtatgccaaaaaacttgatttcgaaataaatgacagaagaaccaatggcttttaccattctccttggcaaagtgtggatgaggaaggcaaaaggctatccaaatcagaattggaaaaacaaccaaaaatcgaagattggaacgacaatccaatcaatggaaagaccatagcccaattggtcgtctcttcgctagaaccgcaaaccaagatacgcagggacctgacacacggacttcaaactgaatcgacgttgaatattcagaccgagaaactgcatcagtcagactatattcacgaattagagaccattttcgagcgccagcacgttgatcagacgacgcaagaacaattactggaggccactttccataccaaaaatccaaaggcagttggagctgctgcaaaattggtaggaaaagatgcccttgactctcggtactatcgagccagtcgagcaactcccgctttcgaggaataccgggtcatggctgccatcgacaccttaagaatacgtgaacatggaacagaacgtcaactcacaacagacgaacgccgaaaactgtttgacttcatcaagggactgccttccaaaaaaacgaagaacgaaccttcaattagctctcttacttggggtgatgttgctgactttctcggaatacaacgaatcgacttgcgcgggttaggctctcttaaagacggagaaccggtgtcggcaaaacagccgccagtcatcgaaaccaacgacatcatgcagaaggcccctgaccctattgcagcttggtggtcacaggcgaacactaaagaacgagaccgtttcgtcgagttcatgtcaaacgcgggcgcaataaaagatacatcagatgaagttcgtaacatcgatgcggagatttcacaactgttggaagaactaacgggctcagagctcgaatccctcgacaagattacccttacttcaggaagagcagcatacagctctcagacgttacgcaacatcaccaactacatgtacgaaaccggctgtgatttaacaaccgcacgccaagagctctatcatgtcggcaagaactgggctcccccagctcccccaatctatgagcataccggcaatccatcggttgacagaacgttcagcatcattcatcgctggctatgcaatatgagagaccagtatggtgaaccagaaaccgtgaacatcgagtatgttcgagatggtttctccagcacgtccacacagctggctgaacagagggaacgcgataggaggtatgccgataaccttaagatgttgtctaactacgaaggagcaagttcacgctcagacgtccgccgcatcaaggcacttcaacgccagaattgccaatgcatttattgcggacgtaccataacgttcgagacctgccaaatggatcacgtattgcccagaaagggccctggatccgattccaagttcgaaaatctagttgccacatgcggcgaatgcaataaaagcaaaagcgataccctctacatgaattgggcgaaaacgtacccaaatactaatttgcaagacgtcctgagacgaattcaggagtggagcaaagatggttggatgaccgacaagcgctggagacaatataaggaagcgctgattctgagattggaagcaacggagaagcaagagccactggacaacagatccatggaatccgtctcatacatggcaagggaactgcgcaatcgcatttacggtttctacggttggcacgatcaagatgacgcactcaaacaaggcaggcaacgggtattcgtttcatcaggctcgatgaccgcagccgcacgaagaacgccatttgaaagccctctgatcaaaggcgcagacgaagagacgtatgaatcatcattgccctggcttgacggtatgaagggcaagacccgtctcgataggcgtcatcatgccgtcgatgcgagcatcatcgcgatgatgcgccctcagattgtaaaaatactgacagaagcacaggagattcgttctgagcagcacgacaagtacaggaaaggtcagacgccggactacgtgtgcaagcgtcgcgattattggcgcaattggagaggcacgccagacacgagagacgaagaggtcttcaactattgggctggcgagcagctaagaacgcttacggatcttgtgagccagaaaatggcggatgatgaaatacccgtcatctatccaacaaggctccgactgggcaatggaagcgcacacaaagataccgtcgtctccatgatgacaagaaaggtcggagacgaattaagcatcacggccattaataaagccgaatccggtgcgttgtacaccgcgctgacacgggattctgatttcgattggaagacgggtttgtcggcaaacccgaaccgtcgcatcagagttcacgataagtggtttgaagctgatgacaccatcaagttcctggaaccggctgttgaagtggtgctcaagaataacacgagagccagaatcgacccggaagcgcttgataaagttcacagtacgctttatgttccagtccgcggtggcatcgcagaggcaggaaattcaattcaccatgtacgcttctataaaattccaaaattgaattctaaaggcaaacaaacaggtagcatttatgccatgcttagggtgctgaccatcgatcttgctatgaaccagtacgataaagaaaccggcaaaaaacaagatctattcacacttccactcccggaatcctcattaagcagaagattcagcgagccgaagctacgtcaggcgttgattgacggcactgccgaatacttgggttgggctgttgtggatgatgaacttgaaatccctgcattcgcaaacgccaggataaccgaagaacaggccattaacggcagcttcacagataggttgctccattccttcccaggaacccataagttcagattcgctgggttcagtcgaaacacagaaatagcaatcagaccggttcagctggcatcagaaggattaatcgaaacagacgaaaaccgcaaaaggcaacaactacgactcactcaacccaatacagaatatagcaacagtattaaaaatgtcctaaagagtggcttacacttgaaagtcaacacgttattccaaaccgggattctcgttacccgtgccaactctcagggtaagcaaagtattcgattctcaacagtagaagaataa

SEQ ID NO: 49 - DNA, 3288 bp, Corynebacterium camporealensis
  source 1..3288: mol_type = unassigned DNA
atgcagaagaactaccgcgtcggtatcgacgtaggcacccactccatcggattcgccgcgattgaggtcgacgatcacgatcgtccgatccacatcctctccgcaatgtccctcatccacgactccggtctggatccggatagtaacaagcgcgctctcactcgactcgccgaatccggtgtcgcacgtcgcacgcgccgcctctaccgccgccgtcgcaagcgcatggttcgcctagagaagttcctgcagcaccagggatgggaaaccaaaccctttgaggattactctgacccctatatcccgtggaacgcacgggttgctttggtcaatggttatatcgaggatgatcaacaacgcggtgagtacctttcaattgctcttcgacacatcgctaaccaccgcggttggcgcaacccctactggaagactcgtagcctttacagtcccgaaggcccaagtgatgcctttgaaaccatccgtaaggatctagaaaagcgtgccggccgcccagtccccaaggacatcaccgttggacaactcattactttcgctcgcatcggtactgaccgaattcgcggcgaagcacaaaataagaagaccggacacaataaccctgcaatcctctctgcccggctgcatcagctagaccacgcacgcgaaattaacgagatcgcaaaggtgcaaaagcttgacgacgatcttcgcaagcacattatcgacctcgtatttgccgctgaatcgcccaaaggagcccaacttggtcgcgtcggtaaagatccccttcaaccaggtaaagatcgtgcactcaaggcaaccgatgccttccagcgctaccgtatcgcagcactgactggaaacctacgcattcgcggcactcaagggaacgaccgacttactcgagaacaacgccaactaatcttcgaccacctggttaatcttccccacaccgaagaaccttcctggctcaacattgctgagattctaggaatcgacaggggtgatctacttggcactgcaaccatgactgacgacggtgaacgggccggcagtaagccaccagtgcacgacactaatcgtgcgatcctcagttccaaggtcaaaccactggttcattggtggaaggctgctaacttcgacgaacaaaaagccatgcttaagtccctttccaacgcagaagtcgatgacttcgactctccagcgggtgccagcgtgcaggctttcttcgccgacctcgatgagaagcagcacgacaagcttgattcactgcacctccccatgggccgtgctgcttacagcgaggacacgttagttcggctcaccgaaaggatgctgaacaacaaccaggatctctacgaagctcgcctggccgaattcaacatcgccaaagactggacaccacccaaaccgcgtatcggcgagcccgtaggaaatcccgctgtcgaccgcgtcctcaaggcaaccgcacgttggctcgaagcagcgcacaaagagtggggtgctccaaagagcatcatcattgagcacgttcgtgacggttttatcagtgaagcgaaggctcgcgaaatcgaccgtgacaacaaccgccgcgctcagcgcaaccgtgaactgttcggaaagatgcaaagcaaactcggtatcgagggcaaaccacgctcagccgatctctggcgcttccagtccgtccagcgacagaactgttgctgtgcttactgtggagacaccatcaccttccagaattgcgagatggaccatatcgtccctcgtgccggcgaaggctcaacgaacacccgcgacaatctggtcgctgtttgccaccgttgcaacctggcaaagaagaacatccccttcgcggtgtgggccaagaatgccaacatccctggtgtcagtttgaaagaagcactgaatcgcacccgccactgggttgaagataccggtatgtcatccaaggatttccaacgctttgtcagcaacgtccgtgcacgtctgaagcgcaccagtgtcgacgaaccactcgataatcgttctatcgaatccgtagcctggatggccaacgagctacgcagccgcgtcgcgcaacactttggtgaatacggaaccaaagtcggcgtttaccgtggtgagctaaccgccgaagcacgaaacgccgctggaattagacgcaagcttcgtttcatcgatggcactggcaaatcacgcctcgaccgtcgccaccatgcagtcgacgctgctgtcatctgctttacccaaaactacgttgctgaagtcctcgccaaacgctctagtatgcgccgcgccgcacagcttaaccgtgagccggagcaatggcgtgagttcaccggcagcaccgatgcgcaccgcgctgcatggaatgcatgggtcaacaagatgcacctccttgctaaccttttgcaaactgcccttgatgaagaccgcatcgtggttacctcaaaccttcgccttcgtctggggaatggtcgtgcccacgaagacaccattggtgagctaaagaaaattcgtgttggcgacgctatctctgtcactgacatcgatcgtgcctccaccgaagcactatggtgcgctctcacccgcgatcccgacttcgatccaaaggaggggctgcctgaaaaccctcaccgccgcatccgcattcatggcacctggtatgacgccgacgaccacatcgaggtattccccgtcggcgccggcgcgatcaaggtacgtggtggttacgccgaactcagccgtttccaccacgccagggtctacaagatcacctcaggcaaaaagccaacctacgcaatgctccgcgtctacaccacagatctcactgcataccgcaatgaagacctcttcagcgtagaaatcaagccccagaccatgtcgatgcgccaagcagaaccaaagctgcgcaaagcaatcgcggaaggacaagccgaataccttggctggattgtcatcgacgacgaactactcatcgacacatcttcatttaactctggacagattgccgagatgcaagctgaatttggcatggtgaggcgttggaggctcgatggcttcgtttctccctcaaagttgagactacgacctctccagatgagtggagaaggactagcccctggggccagcgcgggttcaagaaagattgttgaccagcccggctggcgtcccgccgttaataagctgttaagtgcgggtaacgtcaccataattcgacgaaattccctcggccaggttcgcttgaatagtaatgctcacttacccaccacgtggaaggtggactag

SEQ ID NO: 50 - DNA, 4119 bp, Legionella pneumophila
  source 1..4119: mol_type = unassigned DNA
atggaatcttctcagattttatcccctataggcatagatttgggcggcaaatttacaggggtttgcttatcccacctcgaagctttcgcagaactcccaaaccatgcaaatacaaaatactctgtcatcctgatagaccataacaactttcaattatcccaggcacaaagaagggcaacaaggcatagggtcagaaataaaaagaggaatcaatttgtaaaacgagttgccctgcaattattccaacacattctttcacgagatctaaatgcaaaggaagagacagcactctgtcactaccttaataaccgaggatacacttatgtagatacagatttggatgaatatataaaagacgagactacgattaatttattaaaggaattactgccctcagagtcagaacataatttcattgattggtttctgcaaaagatgcaatccagtgagtttaggaaaatattggtatctaaagtagaagaaaaaaaagatgataaagaattaaaaaatgctgtaaaaaacatcaaaaatttcattactggctttgaaaaaaacagtgttgaaggccatagacaccggaaagtgtattttgaaaacatcaaatcagacatcacaaaagataaccaacttgatagcataaaaaagaaaatcccttctgtttgtctctctaacctgcttggacacctaagtaacttgcagtggaaaaacctgcaccgctatctggcaaaaaaccccaaacaattcgatgaacaaacttttggtaatgaatttcttagaatgcttaaaaacttcagacatcttaaaggaagccaagaatctttagccgttcgcaacctaatacaacaacttgagcaatcccaagactatatatccattcttgaaaagacaccacctgaaattactattcccccctatgaggcccgaacaaacacaggtatggaaaaagaccaaagtctattacttaaccctgaaaaacttaataacctttatccaaactggcgcaatttaataccaggaatcattgatgcccaccctttccttgaaaaggacttagaacataccaaattgcgtgatagaaaacgcataattagcccgtctaaacaagatgagaaacgagactcttacattttacagcgatatttagacctcaataaaaaaatcgataaatttaaaattaaaaagcaactctcgtttcttggccaggggaaacaactaccagccaatttaatagaaacacagaaggaaatggaaactcatttcaactcttcattagtgagtgttcttatccaaatagccagtgcttataacaaagagagagaagatgctgcccaagggatttggtttgataatgcattcagtctttgtgagctatcgaatattaatccaccacgcaaacaaaaaatactaccacttcttgttggagcgatactcagcgaagatttcatcaacaacaaagataagtgggctaaattcaagattttttggaacacccataaaatcggacgcacttcattaaaaagcaaatgtaaggaaatcgaagaagcacgtaaaaactcaggtaacgcatttaaaattgattatgaagaagccctaaaccatcctgaacatagcaacaataaagctctcatcaagataattcaaacaataccagatatcattcaggccatacaaagtcatcttggacataatgactcgcaggccttgatatatcacaacccatttagtctttcgcagttgtatacaatccttgaaaccaagcgagatggttttcataaaaattgtgtagcggttacttgtgagaactattggagatctcaaaaaacagaaattgaccccgagatttcatatgcttcaaggttgcctgccgacagcgtaaggccttttgatggtgtactggccaggatgatgcaacgcctggcttatgaaattgcaatggccaaatgggaacaaataaaacacattcccgataactcaagccttttaattccgatctaccttgaacaaaaccgttttgaatttgaagagtccttcaaaaaaatcaaagggagcagcagtgataagactcttgaacaagccatcgaaaagcaaaacatccagtgggaagagaaatttcaacgcattattaatgcctccatgaatatttgtccatataagggcgcatcaataggcgggcaaggagaaattgaccatatttatccgcgctcgctttcaaaaaaacattttggagtaatttttaatagcgaagtcaatctcatttactgttcttcccaaggaaatcgagagaaaaaagaggaacattatcttcttgaacatctaagcccactttatttaaagcaccaatttggcactgataatgttagcgacatcaaaaattttatttctcaaaacgttgccaacattaaaaaatatattagttttcatttgcttacgcctgaacagcaaaaagcggctaggcatgccctctttctagattatgacgatgaagcattcaaaacgatcactaagtttttaatgtcccaacaaaaagcgcgtgtcaatggaacccaaaaatttttaggaaaacaaatcatggagtttcttagcaccttggcggattccaaacagctccaattggaattttccataaaacaaatcactgccgaagaagtacacgatcatcgtgagttattgtccaaacaggaaccaaaattagtcaaaagtcggcaacaatcgttcccaagccatgcgatagatgcaacgttgacaatgagcataggtcttaaagagttcccgcaatttagtcaggaacttgataattcctggttcatcaaccacctaatgcctgatgaggtacatttaaatcccgttcgatccaaagaaaaatacaacaaacccaacatcagcagcacaccgctgtttaaggattctctttatgccgaacgattcatccctgtttgggttaaaggcgaaacatttgctattggtttctcagaaaaagatttgtttgaaataaagccatccaataaggaaaaattgtttacccttcttaaaacctattccactaaaaatcctggcgaatcgttacaggaattacaggcaaaatccaaagccaagtggttgtatttccctataaataaaactcttgctcttgaattcttacatcattatttccataaagaaatagtcacaccagatgacacaaccgtttgccatttcataaatagcctacgttactacactaaaaaggaatccattactgtgaagatattaaaagagcctatgcctgttctgagcgtaaaattcgaatcttccaagaaaaatgttttaggctcttttaaacatacaattgctttgccagctaccaaagattgggagagactctttaaccatccaaactttcttgcactaaaagccaaccctgcccccaacccaaaagagtttaacgaatttatcaggaagtattttctttctgacaataacccaaattcggacattccaaacaatggacacaacattaagccacaaaagcacaaagccgttcgaaaagtattctcactgccagtaatacctggtaatgcaggcaccatgatgcgtataaggcgcaaagataataaaggacaacccttataccaactgcagaccattgatgacacccctagtatgggaattcaaattaacgaagacaggctagtcaaacaagaagtacttatggatgcttataaaaccagaaatttatcaacaattgacggaattaataactccgagggacaagcgtatgctactttcgataattggctaactctgcctgtttcaaccttcaaaccagaaattataaaactcgaaatgaagccccactccaaaaccaggcgctatatacgaattacccaatctttagctgattttattaaaaccattgacgaggctttaatgattaaaccctccgattcaattgatgatcccttaaacatgcccaatgaaattgtttgtaaaaacaaattattcggtaatgaattaaaaccacgtgatgggaaaatgaaaattgtatcaactggaaaaattgtgacttatgagtttgaatccgattccacaccccaatggatacagacactctatgtcactcaactgaaaaaacaaccatga

SEQ ID NO: 51 - DNA, 3120 bp, unidentified
  source 1..3120: mol_type = unassigned DNA
ttgatatactcagccaatagtatggcacaagtcgaaggagatgtcaagaaccgcatgaggaagtacattctcggcatagacctcggggtcaactccctgggggcggcacttatcgactcggaaaatcaagcgattgtgtggacaggtgtccgaatcttctcggggccgttcgagggcgattattcgtccggcattgaggaatctcgcgcccggcagcgtcgcaccaagcgccagctgcgccgccagattgaccgccgacggcgccgcctccagcgggtattcaccctccttcaacgtttcggcctgctgccctcaggtgaacgaaggactgtgctccctgcccttgatgcggaactgcggaagcgatatcccgaaactgaaacactgccgtacttccttcgcggccgagcgctggacgtgaaactggagccattcgagattggacgctgcctttaccacctcgcgcagcgccgcggattccaaggccgcactgctttcgcggacccagaggagaaaagcgggggcaagttcggagatgaaatgaaaggcttgtggaacgagatttgttccagcggtgcgcgaacgctcggcgagttcctcgcccggcaacctgcgagggaggtccggctgcgcgggcggcatacgcatcgcctcatgtacgagcaggaattcaatctgatttgggatgcacaaaagcagcaccatcctgaaatcctgacccccgagcacaaggctctgttattccaggccctattctttcagcgacctcttaaatccgtcacacacttgataggcgactgttctttggagcggggggagaagcgtgcaccatgttggaccttgcaagtacagcggttccgagtcctcagcgccgttaacaacctgcgcgtggtggagcctagcggcaagataaggcctctcgaaccccaggagcgggaacttctggccgcggaatccctccggcgagagcaactcaagttttccacgattcgccgcatactgaaacttgacaaggattgccgcttcacagttgaagagggcggcgaggactgcattccgggcaacgccacctccgccagaatctataaggtgatgggggacgagtggctgaagtggccgcaagacaggcaagaagcccttgttgctatcctcggggatacctctcgttaccccacagatgacgatttagtgaaagagcttgtcacagctctgggcttgcccccggagaacgcgacaagactttgtgcggtggccttgcccactggctatgcctctatctcccttaatgccattgccaaagtcacgcctcgtttggagaaagggatgacattcgccgaagcgagacgcattctttggccggaagacttcacggagaaaccaccgttggcattgctgccccccgtctgtgacaccgatctcaagagggaactccggaaccccgccgtgctccgcgccttgagcgagctgcgcaaagtcgtgaacgccgtaatccgggaatttgggaaacccgtttcgatccacattgagctttctcgggacttgaagcgcaaccgtaaggagcgtcagcaggaaagcgagaggatgcgatcgcgtgaaagggcacgtagtcaagcccgcactgcattggccccttactatggcgaaaacgtgccgaaccgcgaaatcgagaaatacctcctttgggaagagtgcgggcatcggtgcccatacactggtgaagtggtcgccctgtcagacctctttggaccctatccccgcttcgaagtggagcacatcattcctttcgaccgctgtctggacgattcattccaaaacaaaacattgtgcgaaatcaacaagaaccgcgagaagggcaagcgaaccccttgggaggcctttgggcatacgccggaatggcctagcatggtcgaacgtgtccgagcgttcggaaactccgccaagctccgccgctttattatcagggagacggaggctgaaaggcttctcgaagagttcagttctcggcagcttaacgatgcccgttacgcgtcccgccttgcggcgcgttaccttgggctcctatatggaattcaaggctccgacaaccggcgcatcatcgtatgcgcgggagccgtgacagcttatctgcggcaggagtgggacctgaaccgcatcttaagcgcgcagcccgtcaagagccgggaagatcaccgccatcacgccgtcgacgctctggcggtggcgctggccacaccagctcaaatcaaagcgctggccgagtgcgcctcccgtgccccccaggtgggacggcgtcgcttcgcgccgctgcctgatccttggcctggatttcgcgatcaggctcgccgggccatcttgggcaccttagtctctcaccggcctcagcgtaaactcaaggcggccctccacgaggatacctattacagcccgcctgtggaacgggacgggaaacttagtgtgcgttgccgaaaacccgtgaacagcctcagcgcgaatgagatcaacgccattgtggaccccactgttcgcgaaactgtccgcaaggcttgggaggaggttgggcgggactccaagaagctgctcaacaattggccactccttcaaacgcggcgtggagatttggtcccgatcaagcgagttcgctactacaaaacccaacaggtgcaacccatcgctgcggaggacccagctcgcacccgatacgttatcccgggcggcaaccatcacatggagatatgggcggttttggaccgtagcacggggaagccgatcaagtgggcatccgagaccatctctgtgctcgaagctcacaggcggtaccggcaaggatcgccgatcatccagcgcgaccacgggcctgacacccgcttctgtttttcgctgagcgagggcgacttggtcaagacgcgccgctcggaaagagattccgagcgaatatggtacgtgcgctccgtcaaagccgatggaagggtggttatgtcgcccgccacggacgccaggaagaaggaagatataagcaagagcggcgaactatggcaggtgtcggtcaatccccttatgcggctgggggctgccaaagttgtggttaccccgctcgggaaggttatttacgcccatgactga

SEQ ID NO: 52 - DNA, 4065 bp, unidentified
  source 1..4065: mol_type = unassigned DNA
atgagtacaaaaaaaattgttggttttgacctcggaacaaactctgttggatgggctgttgtagaaaacagtgatgaaaatgctgcaaaaattgctggagctggctccagaattcttccacttgatccgaaaattcttgatgctttcgaaaacggacaaaagcttacgaaaaatgctgaaagaaggcagaaaagaagtcagaggaaaacacttgacagatatcagttaagaagaaaatatctaattgaaagccttatcataatgggttgtcttcctgaagatttcacacctcagaatgcagggagaaaattcaaggaattaattgaaaaaccggatgagttaaaaaatttgcctgacgattggtatgtttatatgctccgaagtaaagcattgaaagaaccagttacacaaatagaatttggaagaatcctttatcaccttaaccagagaagaggatacaaagatattggagaattgatggaagaaatagaagagaaggacgatactaagcagggaaagaaatatgataaatggattgaacaggtaaccatttatagtgtagaaaaaaaatctgatttgaaaaataaaaaacaggagtattgggttattctcgatgatggaagagaaggaacatcaatcattgcaaacatcgaatcattgactgggaaggaaatagaactggaaatacgaagacgcgttaaaaagaatagcgaagaaacttttgaatttgcactacctaaccgcaatgactggcaaaataaactggacgctctcgataaacagataagccagtcaggaatgcatgtaggagaatttttctggaacaagattaaagaagacaggtatttcagaattagacaaaattttgtacatagggaaaaatacattgaagaattcgatgcaatttgggaaaaacaacaagaattcatacccgctcttattgacgaaacagttaagcaagatgttattcaaagaattgtcaggaatgagaaagaacgacaaaaatgggccaaaaaaccattgaaagagtttataaaaaattacatcatctattatcagagacccctgaaatcacaaaagtcaaaaaaagccaactgcagattcgagccaatgattaaggttattaatcagagcactggcgaaagtttaagtatcgaaaataaatgcatgcccctttcatcaccactttacgaagaattcaggatttggcaaaagcttaataatttaaggtataaagatattaataataaaaattatgaattaacaaatgaacaaaaggaagctttgtttgaaaaactaaataatggacaaactttaaaagaaagttctatttttaaaatacttggacttgataaaaatttatatagtgattttaatttcgaccaaattgagggacatactgtaaaatcaaaaatcgcaagcgtacttaaagattacgattcgggaaaaataataggaaacgaagaatttctttacaaagtctggcatcttttatattcggtaaatgaaactgaataccgaaaaaatacactgatcaaatggtttaatcttaccgaagaagatgctaaaagattggcaaaagtaagattcgaaaaaaaaacaggaagtttatcatcgagagcggtaaaaaaactcttacccctaatgcgagcgggaaaatattttgatgaacaatccttgcacgactcaatactttttagaattaacaacataattaacggcgaatttgatcctgatgttacagacgatataagagaattctttaaagaatataaaagcatacgggatttttccggtatgccatattggaaagcggcaacattggtatacggaagccattcaactggtttttctgacacacgttatgaaaaacccgaagaaattcagctgattccagcaggtgagctaaggaatcctgtagttgaacaggtgataaatgaaactctgcagattgcacgtgatatttggataaaatatggaaaacctgacgaaatccatctcgaaatggcccgcgaaatgaaaatgaattcaaacgaaaggcaaaagctgaccaaggccatgcgggatcaacagaaaaaaaatgaagaatatgaagaaatattgaagaaagaatttaacatactgaaaccaagcagaacagacattattcgctatagattatatattgatcagaaacaacgctgcctttatacaggtaaacctattcaaaaaacacagctgtttaacggagaaacggatattgaccatattataccccgccagaggtattttgatgattcatataataacaaagttctatgttttagaaatgtcaacgaggaaaaatccaacatgacgtcctatgaatttatgcagcaaaagggaattgataagtgggaagattttacacgcagagtaaatgaactatacaaagaaggcctaatcagcaaaaagaaaaaaaattacctattatctgatgaaattccgaaagattttattaaccggcagttgaacgaaacaagatacattacacgaagagtaaaagaagaacttgaaaaaatttctccggttgttacaaccgttggcagtattactgattacctaaaggaagactggaaactcaacaaggtgtttaaagaagtccagctcgggcgattcaggtcgattgagaagaaaatagacaaaaaacttattcaggaaatcaggataaacggttatcacgattatcaaattgaaggatgggataaacgaattgatcacagacatcatgcactcgatgctataaccattgcatgcaccaaccgatctatcattcaaacacttaataatctagcccagttatatgaatcttcggaacctatcaaaaataaaatatcacgacattttcctgtaccggcacctgattttcgcgaccaggtaaaaaacactctggaaaccatgattgtatcacataagagcagacgccggcttattaccaaaaaaagagcatattataaagtattagatccttccacaggtgcttatattcttaaaaaacaggaaaaaccatcacctgttgtcagaggacctctgcatgatgaacaacccctgggagaaattaaagaatatcaaaaaataaaaattaaagatgccataaaaaaacttgaagaaaacaaaaacaaccttgataaatttataaatggaaccttccctatagaatggcaaagaaaaaagataaatgaaaaactttctatttataacaacgacccaaaactttttctaaaaaatctaaataaggatgccatacttaatttaaagggagaaaaattggaatatattaccatactggtaagaaaatatgttaagagccgtgatttaaatacctccattacactcagccagattgaaaacattatcgacagaaagctgaaaaatgaaatcaaaaatcatcttaaacaatataataatgatcctaagaaggcatttaccgatgaaggattgatgctttttaatcaaaaccgaaagtttccagtttataaggtgcgctgtaaggttgatgaaagcgaagttgggactttaacaacaagagaacctctcgaaagagatagcgagaataatccaaaactgcatatcgaaaaaggggaaaattatggattcgttatctatgaaaacaaagaaactggtaaaagggaatatgagaccatttcattttatgatgcaatatcattagcccggatgggtttatcaatagttgaagcccgacctggatatagacattgcgtattaaaacataatgaattaatttatgtattaaggccgggtgaagaaaaaaaattgattaattggaatgattataaaaacctcaataaccgcatttatcgtattgtaaaatttacaaataaaaggctttacgccgtcccgcaccaggtggctgagaacatagttcttaatgaagaatatgaaaactttaatgaatttggttcaaataaaaattgtttagaaatcatctctgatgatgaaccaaaaacaaaaatttcagaacgttgtataaagattaatgcagaccgtttaggaaacattaaaccggcaccttgggaaaatgattaa

SEQ ID NO: 53 - DNA, 2919 bp, unidentified
  source 1..2919: mol_type = unassigned DNA
atgaaaactttgggacttgatttaggcattaagtcggtaggctgggcattaatagaaagcgatgaaaatcgtgaaaattacagaattcttgatttagggataagattgttttcgtcgggacaggctattgagaatggaaaagttgtcggacctcctgcccttccgaggagagaagcaagatcgtccagaagaaccataaggcgcaaaagagcaaggcttatccgcattaaaaaatttttacataattacgggttaataaaaaatattaaagatttgttttataacaataagataacagatgtttgggaactgcgagcattagctcttaatgaaccgttatccccggaagacttctcaaggatattaatccatattgccaagcatagaggctatatgatgtctgttgattctgacgatgatgaaattgacggtgataaagacggtaaaaaagacgataagaaaaaaattaaaaaagcaatagcagaaaccgaaagagcaattaaagaacttaattaccgaacatacggcgaatatgtttacaaaagcgcattagacagcaaaaagcctatgagaaacagaggcggcgaatacaggtatttccccagtaataatttgcttaaaaaagaaattgatattatttttaaaaaacagtttgagttaggtaataaatttgcgacggaagagcttaaaaataagtattgggaaatagcaagctctattaaagattctaagtcgtttgaggatatggtaggcgcctgcactttttttaaagacgaaaaaagagcgcctaaaaactgttattcggcggaaaagtttgttttattaacgtctattttaaatacggttgtcatagacgaagatttaaaagaaattaaaataataaatattaagcatatagatgaaatcattaatttcgcagaaaatgaagacggcgggatttcatacaagaaattaagaaagtttttatctattcccgataccgcaatgtttaaaggtattagttatgaaaagaaaaagaaagccaaaggcaagaaggaaacagacccggaagataaagttttcgtaaacatgtatgggcttaacgctttaaagaaaatctgcggagaaaaaattgcaaaagataaaggattatctcttaaaataatgcgggttttaacctattttaaaggcgtagaacaacgaagaagcaaattattagaaatagaagaattaaacgccgatatggcatctcaattagccaaattagaaaatataaaagaatttgtatctctgtcggctaaagcgattgaaatattgctgccttatatggaaagcgggttaagatacgacgaggcggttaaaacggctcgaatagatggaaaaattccttatgaagaaaatctaaaacaggatttacttcctgctttagacccaaaaacaaacatacgcattaccaatccgactgttttaagaacattatccgaagcgagaaaggttattaacgccgttatcagaaaatacggaaaattggacagagtcaacattgaactcgcaagagatattaaaaccaaaaaagaacgtttaaaagcaatacagactcaaaataaaaatatagagagtaaaaaacaggcggaacagttattaaaagaaaaagatttaaataatccgagtcctaaaaaagacatatctaaaaaagacatattaaaagcaagattgtataaccagcaagacggaataagtctttattcgggggaaccgataaaacttgaaagacttacagaagacggatactgtcagatagaccatatattgccgcgctttaaatctatggataacagctttaataataaagtattgtgtcttgcagaagaaaatcagaataaggctaacgatattccttatgactggctgtcgaaaacagggcagtttgatgagtttaaagcaagggttttgtcgatgaaagataagttaagttatcaaaaggtaaaaagacttttaaccgagaaaatagatgccgaagggtttatagaaagagatttaaacgatacgagatatgcgtcaaggacattaaaaaaatacttagaaacctatttaaaaataggcgaagacgacaataaggtaaaagttttagccgtaaacggctatttaacggcagaattaagacatcagtggggattagaaaaggatagagatgcaaacgatattcaccacgctgttgatgccgtggtaatagctctggcaaacgcaggaattgttaagaaattggcgaattattacaaagaacgcgaatatagaaaacatcctaaatttacagaacctcttgagaattttcgcaaggtgttaaacgaaaaacttgttaatttgccggtaaacaggcttttagtatcaagaccgccgagaaagaaagtaacgggacaggctcataaagaaacggttataagcccgaaaaacaaagaccatagcatgattgaaattcataaaggcaggggatatgcggaacagagtcttatgccgagagttgacgtcttcaaaaagggtggcaagttttattatgttcctatatatgttgccgacttcgctaaaaaagaattgccgaataaaattattacgatagggaaggaaaaaaacgaatggaacgtagcagacgacagttacgagtttttgttttcattatttaaagacgatctgataaagtttaaacagaaaggcaaagcagaggtcatgggatattttttaaatattggtattagtaattgccaaataacatatcaaaatattaacggctcaaaagaaaaaaacagcaaaggaaaagaatttgatccttattttggcggcacaacacttgaatatatcaagaaataccagattgacccgttaggtttttattatgaaatcaaaaaagaacgcagattaccggtttcgatgaagaaaaataattaa

SEQ ID NO: 54 - DNA, 3141 bp, unidentified
  source 1..3141: mol_type = unassigned DNA
atgaaatattcgctggggcttgacatcggtattacctctgtaggctgggccgtgctgaatctcgataaaaagagagtcgaagctcttggggtgcgaggattcaacgcggcggaagacccaaaaacatgggcatcattagctttgcctcgaaggcttgcacgcagcgctcgccgacgattgcgccgacgggcgggtaggctgcgtagagctcgcgatctctttataaagtacgagctcattcaagcgcaggagattaaatctgcatttgagactgttctagggcaaccatcaccttgggaactcagagcggaaggcctggatagattgctgactgggcaggaatttgcacgggcgctttttcacatcataaaaagacgtggattcaaatcgaaccgcaaggcagcaaaaagttcggaagatggcaaaatgatcgcgggaattgaagccaaccgtgagagaatgcgagagaaaggcttccgaaccgcaggcgagatgtactggagcgatccattctttgatctccgcaagcgcaatacaacagattcatatataaatacagttgatcgtgggctgcttgaagaagaaataaaaacacttttcaagagacaaagagaattaggcagtgtgttcactaagcatgagttcgagaacgcgatattagaagtattctcctggcagaaaccttatgtttcaggcgatgacataataagaatggtcggaacttgcacatttgaaccgaatgaactgagagctccaagatattcctatcatgcggaaagattcttactccttcagaagataaacagcacgacatattccacaaatggcgacaaagagcgatttacccccgaacaacggaaagtgatcgaagggttggcgtataaaaatgtgagagtgacatatgcgcagatacgcaaggcacttgatctaccggaagaagcgcgatttgccgggcttacatacctacgtagaccggaaaaaaaggcagaacttgtagaatcgctggagtgcgagaatactgttttcttcgagcttaagggttatcattctatacagaatgcatgctcggtagatgggatgtgggaccgagtaaagcaaaaccctgaattaatggataaccttgcgacagcgctgacgttttacaagacggatgaggatatagaagagtggctaacggagcgtggagtagagaaggagataatcaacgcggtttccggatgtgagtttacaaaaaccgcaaacctctcgctagtggcaattaaaaagatccttcctcatctggaagaaggtttgcattacagtgaggcatgcgcgaaagcaggctataatcacaccggtttaagcggtgagaaaaagaaagataaattaccatcaataccggtggatatgatcaggaatccagtcgtgctgcgggcgctcagtcaagcccggaaagttgtaaacgcggtaataaatcgttacggctcaccatacgcaatacacatagaatttgcacgtgatatgggcaagagcgcagacaagcgaaaagaagaggagagaagacaaagagaaaacttaaaggaacgagaggaactcgaggaacagttcagagagacattcgatgggcgtgagccgaacggaaccgatatgctaaagtggagactttaccgggagcaaaggggctgttgcgcatattcattgcagcctatcgacctgaatagattgtgtgagcctggttatgtggaggtggaccacattcttccttacagccgcagcttcgataacagcagagcgaacaaggtgcttgtgctgatctcagaaaaccgaaacaagcttaatcggacaccttatgagtatttcgggcacaacgaaaaacgttggtctgaatatgagggatgggtgcgcacgacgataagagacccgagaaaacgtggaaacctgttaagagaaagtttcgaggaaagacaggaagtggagtggaaggatcgcaacttaaatgatacaaggtatgtggcgcgagagtttgcgggattcatccgggcaaatcttctatttgcagacccagataataaactgcctttggtatgtataaatggccaggttgtggcacaggcgaggtggttgtggggactgtataaagaccgtgatgagaacgacctgcaccacgcgcaggatgccgccgtgatagcggctcttttgccttatcagattaagatgataaccgaatactcaaaggttgtcgaaacgagacggaaccatatcgaccctgagacgggcgagataatagaatggaaagagaacgagcgccctcgactgcccgagccgtggaaaggcttccgcaaggaaggagtggagaaattaggtagtattctcgtatcgaggatgccacagcgcaaggtcagtggcgcaatccatgctgatacgataaggtcggcaaagcatatcagcacggatcgcgtaagtgttgtaaagaaaccgcttaattcgctctccgagaatgatttgaaaaatctgttcgacaccgagcataataaacttctatattcagctataaggcagagaatggctgagtttgacaataaggcgcaaaaagcttttgccgagccacttttcaagccactcagggacggcagcccgggcccaatggtacgcagtgtgaaggtatgccaggcgcagtatacaggcgtgaacgtacgcggtgggatagcagataacggcgatatggtgcgcacggatgtgtttagaaagcagaacaaaaagggaaaatgggaatactacctcatccctgtttatactgttgatatgataagtgggaaactgccggataaagctatcgcggcacacaagccttacaatgaatggcccgtgatagataatgaatacgaatttcttttcacactgtatccgtatgacttgatacgcgtagaaactaaggatgggggaggactttattactatagatcaagccacagagccaacggttcacttatcgtttgcaatgtcaacaaagcggacactacatttggcattggtagtcgaactgctatttcaatagaaaaattagaaatgggtgtattgggcgactactttcctgttcacaaggagataagacgtggcctggagaacggtagtcatctcgaacccgacaagattgagagttga

SEQ ID NO: 55 - DNA, 3285 bp, unidentified
  source 1..3285: mol_type = unassigned DNA
atgacggttcgctacaggctcggtctcgatctggggacgaactcgataggctgggcggcagtcgcgctcgacgccgaagggcgcccaggacggctcctggatggcggcgtgcgcatcattacgccgaatgatgaggctggacgagatcccaagtcgaaggcgtcgctggcagccgggcgacgtgccgcgcgggcgatgcggaggcgacgcgacaggttcctgcgtcgtcagaagcgcctgatggaaatacttaccgcaaacggattgatgcctgctgacacagcggcgcgtaaggagctggagaagctggacccctactggcttcgggcgcgcgcgctcgccgagccgctcacacttcacgagattggacgtgctctgttccacctcaaccagcggcgcggtttcagctccaatcgcatcactgatgccgatgacgcggaagggggcgccatgaagcagggcatggcgcagcttcaagaggccttggaacaggcgggggcgcgcacgctcggagagttcctcgccaagcggcaccgccgagaccgcgagggttatcgggtcgacccgtcaggccagcggatcagcaaggcgaacggcaatgatcgcgaggcgtcgaaaggggtaaggttccgcccccacgcagagggcagcaaactgctctacgacttctatccgacgcgggacatggtcgcccatgaactgcggcaggtatgggtagagcaggcaaagacgcataccgagttgaccgagcccctccgtgaacagctcgaacacgtcattatcgcccaacgcccgctcaagaagccccgtgtcgggcgctgcacattcaggccggatgaagagcgggcgccgcgcgccttgccgctgttccagcgctttcgcatcctctccgagctggcggctctcgaaatcgaacgtccgggcagaccggcccgaaagctcaccatccccgagcgcgacctgctcgccaatcttctcgggagccagacgagcccggtgagcttcacgaagatggcgaaagcactgaagctgcccgatgacgccgatttcaacctcgctcgtggtggtcggaagggtctcgatccggacaagaccgctgcgatcctcgccaagaccgggaagggggagagtttcggcaagggctggcgcagtatcccgttcgaccggcaatcggaaatcgtccagcgcctcctcaatgaacccgacgaagatgcgctgatcagcttcctcattgaggagtgcgatctctccgatgagcaggcgcaggccgcatcttccgcgcgattgccgcaggggcacggacatatcgggcccagcatgctggaggagcttgtcgacgtcctccagaacgacagcgtcgaggtggtcgatccacagaccggggagatcctcccgcgaccgcttacatacgatcaggcagtggtgcgcctcggcagtcaccactcacatttcacgggcgagcgccgggagcgtctcccgtattatggcgaggtgctcgcccgccacgtcatcgccaaccccgatgcaccggaaggcagtcaggaacgaatcggacgcgtgccgaacccgaccgtccacattgccctcaaccagacggccaagctggtcaacgccctcatcgaggcccacggtcgccccgatgaaatcgtgatcgaactggcccgcgagctcaagcagaaccggcagcagaaagacgaggcgatccgccagaaccggagcaacgaaacggagcgcgcgcggatgcgcgaggaactcgcttcccttggctatgccgacacgccgggaaacatgttgctcctgcgcctctatttcgagcttccgcccgatgagcgggtttgcgtctattcaggcgaaccgatctcgaaggaaatgctcttctccggtgccgtcgatatcgatcacatcctgccgcgctccaagacgctcgatgacggcttcgccaacaaggtgctgtgcacccgcgagatgaaccgccgcaagggcaatcgtgcgccggctgatgcctggagcgcggaggagctgctcatcattcacgagcgatcgaagcgcctgttcccccggaaggcatggcgcttcgctccggatgcaatggagaaatacgcggagaacaacgacttcctcgcccggcacctcactgatagccagcacatggcgcgactggcgaagacatatctcggaaccctctatggagaagacgccgcaaaacgcgtctggtcgacaccggggcgcctcaccgcaatgcttcgcgggatgtgggggcttaacggtctgctgaaagaccataatcgcgccggcgcggatggcgctgatgtgaagaaccgcgacgaccatcggcaccacttccttgatgccttcgtcgtcgcctgcacggatcgcggcacgcttcagagagtggcaacggcatcagcgcgcgcggaggcgatggagatcgaccgctgggccgaaaagggcgcgtttccagagccgttcgagggttatcgcgagcagatctccgaccgcatcggaaccatggtcgtttcgcacaagcccgatcacggcattacgcccgggcgcgcccgcgagagacaggcgaccagtggccagcttcacgaggatacggcctatggccgggttgatgaacaagtcaacggcaagacctacaatctcgttacccgcaagccgattggtgctttgacgaagaatgaaatcgggcaggtccgcgatgttcgcattcgcgaggcgcttcaggaagtcgcctacgaggccgaccgggacgggatcaagctcggggaagcactcgcccgcttcggggaagagaacggcatccggcgcgtgcgcgtgttgaagactgacaagaccgccattgccctgacgcacggcgatggccgcttccacaagacctatgtgcccggcgacaaccaccggctggagatcttcgtcgcaccggatgggaactggaccggcgaagcggttacggtcttcgatgccaaccgcaaggactttacccccgcatggcaaagcatgacgccccggcccgcattgatcatgcgtctgcacaaaggtgatctcttggaggcggatttcggcgaggggcgatgcatctggcgggtggtgcgacttgaaccgtcagccaagcgcgtccgccttgtccgagatttcgatgcgggtgcatacgaggagcgccataaagacgcagaagaccccttccgctggaactttgccagctacgcgcgccttcaggcggcagcggctacacgtgtgcgcgttgatccgatcggcagggtgcttcccgcgcgagagcactga

SEQ ID NO: 56 - DNA, 3114 bp, unidentified
  source 1..3114: mol_type = unassigned DNA
atggcgttgatctttgccttcgatataggtaccacgtctattggctcggccgtcatcaatcatgatcctggccgcaagatcggtaaaatcttgcgcttgggtgtgaggatttttcccgagactcgagaaccgaagaccaatgcgcctctgaatcagcagcgacgagccaagcgcatgatgcgacgtcaactcagacgccgtcgcgctcgtcgacgcaccctgaatgaagcactgagtagcgctggcttgcttccagcttttggcacgtcgcaatgggatcggctcatgaggctggacccttacgatctgaggagccggggcttgactgaggcgttagagcccgaggaattcggacgtgccatttaccacttggcgcaaagacggcattttcgaggccgggacatcgagtcagagagcgaagatgacaatgcagattcagaggagcttgctgctcgcgctgaagccaaggacatgcttgcgacattgcgccaatcaggtatgaccttgggtcaatggctgaaccagattgaatccggaaagcgcaaacgaggtatccatgccgcaagatcgaccgttgaagacgagtttgaacggctttgggcggctcaggaagcccataacgataaactcaaggatcccgaattccagagttctattcgcaagataattttctatcaaagaccagtattctggcggcagaacactctcggttcgtgccccctgattcctggtgccgaactgtgccccaaaggttcctggctttccatgcagcgaagaatgctggaaaagctgaataaccttgagcttgttggagcgggtgcaagaaagctggaccctgaggaacgcatggctatcctcgagtcactgcaatcacaagccagcatgagctgggccggcgttcgaaaagcgctcagttccatctatcgaaatcgcaatctcaccggagaagagaagcgccttaaattcaaccttgagattggtggcgagaaaggcttgatcggcaaccctctggagcaacgcatcgccgcaatcgttggcaagtcatggtcagctcatccacacaagcagaaaatccgtgaggcgctccatgaacgcctgtggaaagccgactatcggaaaattggcacccagcgtgttgtcattcaacctcaaaagaaaagaaggcttgatcgactgaacgcagccgaaagtatcgtcaaggaattcgaacttccaggagatctgatccaaccgatttcagaaatcagctttccgtcgggctgggaaccctattcaattgacgctttgttacgaataattccggaactagaaaatgggacacgatttggtgaattgcttgtcgggcccgaactcgaagactggagaaccaagacctttccggatcgcattcgacccaccggtcaaataagtgatcgcctgcctagtcccagcgatccggatgagaatcgccgccttcgttccatccgtaatccgacggtggtgcgctgtcagaatgaattgagaaaagtggtcaacaacctgatcgatgtctacggtaagcccgatatcatacgtgtcgagctagcacgtgacgtagggcgatcaaaacgcgatcgagaagagtttcagcgggtcattcgccagcgggaaaccgagagaaaagcagccattcgtgatctggagacaaatggcatcgtccaaccgtcgagatctgatattgaaaagtggctgctgtggaaagaatccggccagatatgtccgtacaccggcgatgccatcggatttgatgatctattccgtacaggccgattcgaggtggagcatatctggccccggtctcgctgtctcgacgatagttttgcaaacaagaccttgtgccgttcggatatcaacaaggagaaggggaatcgaacgccctacgagcatttgggcagcaatactgatcaatggcacagaatgcaggatcgcctcaaaggcatggtcagaaagggaaaaaagcccggcatggccttcagcaagaccaaacgctttctggccaaggagattccggatgatttcacacacaggatgctcaacgataccagttatgccgctcgggaatcggtaaacatgctcaagcaactgtggccgcaaggaggagcgaatatgccggtgactgtgcaggtggtctctggacgtgtaactgcccaactcaggcgactatggggcttgaataatctactgcacgatggtgccgaaaaaactcgggcagatcatcgccatcatgcagtcgatgccctggtagtcgccagttgcaatcctggaatcacccagtcactatcgcgctactggaaattgcgcgaaagcccttcggccgaaactcacccgatcccattgccctggcccgaaatccggcaggatgcaacccaggcactggataaagtcattgtctctcaccgagtcagccgaaaactttccggaccgctacatgaggaaacccattttggcgacacagggctcgaagcggttcgccgggggaccatctatcggcaatatgtccgtcgcaagccgctgcacgaactcagccccaaagaactggattgcatccgggatccggcggttcaatccattgttcgtaagtgggttaacgcccgaggcggcgaccccaagaaggctttttctgacggctatcctaaattgggcaccaacggcccggagatcaaaaaggtgcgcttggtggttgaaaagcgccccgagcttacaattcatacaggcagcggagtcgtcgacaaaggaaagaaccaccatctggcagtttatcggaatgaagaaggtaagctactttttcgtattgttagcctcaatgaggcgaggacagctcttgccgagttgggtcatccggtcgcaaaaactgaagccagtgcaaagctactgttttccctctctgccggggattgcctttccattcccgacggcgatgaaacaaagctctggatcgtaagtagcacttgggcagagggccgagtgaccatctcggaaactcacgatgccgcgggccaaacaaaaaccaatccctcaatacttgctctagtcagaaagggtgcacttaaggtgagcgtcgaccccattggtcgggtccggccagcacgggattag

SEQ ID NO: 57 - DNA, 4578 bp, unidentified
  source 1..4578: mol_type = unassigned DNA
atgacgaaaattttaggacttgaccttggaaccaacagtattggatgggctgttgtagataaagaaaataataaaattgataattgtggcgtaagaatttttcctgaaggcgttgtgaatatgaatgagggtgaagaaagagaaaaatcaaaaaatgccctgagaagagaaaacagacaaaccagacgacaggttgcccgccggagaatgcgtaaaattaaactacttgaactacttattgaacagggtatgtgtccattaaccaatgagcagttaatgatttggaaacattgggataaaaataagaaaagtgaaggtagacactttccacatacaaaagaatttattgaatggttaagattaaacccgtatgaattaaggtacaaaggaattaacggtgagctcacaaaaatggaatttggtcgatttttgtaccatattattcaacgtcggggctttttaagcactcgcaaagaaaaagagactggaaaaatctacgctggtaaagaaaatatggtaggtattgatgataccaaaacggaattgaatgggaatactcttggagaatatctatatactatttaccctgaagaaaatgaatcttataagaatatccaaaatgaagaaggagaggacgtaaggataagaggacgatatactttaagggatatgtatgttgaagagttcgaaaaaatatggcaaaatcaggcctcaaggcttggactggataaggtttctgtaattaagcagaaagttgtttttcttaacggaagtaaagatcgtaatcgaaatgcaaagaaaataaagtatcttaaaaataacagagataaaattgaggttcaggaaattattgttgaaagagagaaagctaataaaacattaacacgcgtaacctcttatgaaaatatacctctgcatgaccatctgggaggaaatattgaaatatcagatgataaaatcaagtttgataataaagatagtgtgttattttatcagcgcccattgcgctctcaaaaaagtttacttggaaaatgccgttacgaaaaaaataaaacacctgtttctgtttctcatcccgactatgagctattcagggcatggcagtatgttaatactataaagtttgggaataatattccattaccaattgagcagaaaagtgcgattgttgaatttctcagaacaaaaaaaacatcagtcaaatttgctgatatagttaagttgcttaatatgtcgcatgaaaattttaattataattatgatgataaagtagaaggatgcccaagcattgctcaattaagtaagctttttagtaatgaaggttgggagaacaactatcacaacatttggcatgatttctacttttttgacgattccgaaaagctttttaaaaagttagctaacacaaaagaatataagatgaagaatgtcatcaagattgatgatattaaaaaagtaagtattaaagacgataaatatgccagtttatcactaaaagctgttcgtaacattttaccatttttgcagcgcggtttaatgtataatcaggcagtatttttggggggagtaatgaatgcttttaattataaagccctgagcgatgaaatagccagatgggataggtttgctgattatcacgatacgattataaaagatatactctcaattattaaagaaagaaataaagaaggagaagcaatacaaaaagtcaaagaatatctttctgatcctgctaatcattatggttttgagaaagaatctcctgcctttaaaaaactgtaccaccatagccaggaaattgaagagaaggaaatgtcggataaattatctgaaatagaaaacctgagaaatcccattgttcagcgagccatacaagaaatgagaagaatgataaacgagttaattgagaagtacggaaagtttgatcgaatagctgtagaaatggggagggaaatgaaattaagtaaaaaaggccggcaaaatgtatcccgcatgatacatcaaaattttgaagcaaacgagaatgttcgagaaattctaaaagattatcagcttgcaccttccaggcaaaatatacaaaaagtgcttttgtttaacgagatacaggaaaaagcaggcaaagttgtttgcccgtatagtggtagaacattaaacattagcgatttgctgggttcagaaaataaagttcagatcgaacatatcattcccagaagtttttcgcaggatgatagttttacaaataagacaatttgtgatgcaaaatttaatcagttaaaaggtaatctgactccttatcagttttatcaacaaaataacaacaaaacattatggggtgctgcaacttgggaagaggttgaacaaagagcttacagtgttttaccttttaataaagccaaacgttttactacccgaaagacggaatggaaaaccgaagaatttatttcacgtcagttgaatgacgaccgttacattagtaaaaagaccaaggaaattctttctgaagtttgtaatgaaattctcgtaatgccgggtgctgtaactgccgacttaagaagattatgggggttaaataatattctgcaaccaacaatcggtttacccgatgatgaatttaatatagatcgtgaaaaagatattaactactgggctgtaaccgacgagaatcgaaagatcaaaaaactatacccgatgaacaacctaaggccggatgctgctgccgaagaaactgttgtcgctggatatgtaacaaaaaataaattcaaagcgcaaaggcttaatcttgaatttgacgcaccggatatttctgatggcaaatactatgtgaagttccatgtatcaaaaccagtaaaaacactgcgtcaatatgtcgataaaccggagtacggagagaacgagattattttaagaggtgtgattaaccggaataaatttaatcatgatagtttgaaacgtaaaattgacgctccaaaaaacattgatgatggcagttattgggcaaaatttaaaatagtggataaaagatttgaagaacctgaaaaaaacaaacggcctgaaaataaaaacggaatatgtcttttcggcaaagtgaaggacaatgttttcacatcttacatttaccagtgtgaaaccaatttagaagatggacattactgggtgctacttgatttagattttgagcatgttgaatttgttgctactaaaaacgagaaacctgatatcgaaaataatcaattattagttttaggcgatctaaaccaggaaggaacttttactgcattgcacgatatacagttgcaatttgactggaatgataaaccgggacgatactgggctgtattaaatatattaccggatattcctgaatttaccgctgttgaaaatgaaccgcctgaaattgaagatgatgagaaattaattgaaggaaaaatatgggtggatcacaaaaccggtgaaattcgttttgacccgaaaaagaatagagacgaccataggcatcatgctgttgatgcaattacaatcgcgctaacagactataataatatcaatcagttaaactggtataatgctcaaaaagataaattggagaaaggaatccctactgaaaggccttcttttgacgaaccttgggagaattttttcagtgatgccagagaagctgcaggcaaaatattggtttcacaccataaagacaataccgttacaaaaaaagtaaccatgattattgagaaaaatggcaaaaaattcagaagtgaaggtcaggccgtacggggacaattacataaagaaacggtttatggtaaaaggacgcctccaagagcagagcaagcatttcatgtgcgtaaaccaatagaatcattaaatgacaagcaactggataaaattgttgacgacaatgttagaagcattgttaaatatgggcgcgaaagagaaaaatttattaaagaacaaattaaagcgttacaaaaagatcgaacaaaagctggagatgaagaagaaaagaaaattgatcagcaaattaaatcgctcgaagaagaaaaccgccaattgtatacactcccgaataaaaatggagacagagtgccaataaaaaaggttcgtatcagggagaatcttggaaatacggagatgttaaaaccttcagaaaatataaaccaatatgttaatccaaggaataatcatcatgttatgatttataaagatagcgatgggcaattaaaggaaagtattgtaaccctctgggaggcagcagaacgaaaaaatcagggaaattcggtttatcagttaccaccggatgggctggaagttgtttcaacgttagcagtcaacgatatgttcttattgggtctggaaacagagcaaaataaggatatcaaaaagctggattatcaaatcttgagtaagcatctatacagagttcaaaaactgtcgagtatgtattatacattcaggcatcatctggcaagtactgtaacaaattccgatgaagaatttagtattagaagttttggaacttgggaaaaagtgaatccaattagagttaaggttaaccagataggtgaagtaatcaggtctttataa

SEQ ID NO: 58 - DNA, 2937 bp, unidentified
  source 1..2937: mol_type = unassigned DNA
atgtcaaaaatgattttaggacttgatttagggattacttctataggctgggcactcgtaaatgttgatgatgaagatgctcaaaacaacaaaataattgatagcggtgtgcgaattttcacaatagccgaacacccaaaagacggcaaatcactagcacttccaagacgagaagctagaggagcgaggcgaactaccaaaagaaaagctcaaaagataaaagccgttaaaaggttgctcataaaagaaaaagtagtaacagcgaatgagcttaacaatctttttatcggcaataaaaaacaaaaagatgtttgggatttaaggcgagaggctctttatagagaactaaacaataaagagttcgcccgcataatggtgcacttagcaaaacatagagggtacgcttcaaaccgtaaaagcgaagagcctacagatagtgaagggaaagccgttctgtctggaattacgcacaacaaaacaattcttcaagaaaaaagctatttaacaataggcgagtatatttccacaaaaaccaaaaaaagaaatggaaaagatacagaaggtaaactcaactatgaaaattctgtctctagagagatgctcataaacgagataacgactatctttgaaagacaaaaagaattttcaaatccacatgccaaagaggaactactagaggagtataaaaacatagcctttactcaaagagctttaaaatctgtcgaaggtatggtagcgaactgcccttttgaaacaaacaaaaaaagagcacccaaagcaagttcaacttttgagacttttagagccttacaaaaactaaaaaatcttagaatgattagcaatgagggtgaaagtgctctcacaaaagagcagatactccaagcaatacaaaaggcaaaaaccgcaaaaagctttacttacaaaacactcaaaactctttttgctcttccaaaagaggttcaatttaaagggcttacctattttgaccacaaaacgggagaggcaaaagagcctgagagtgcaaaacttttagattttagtgcttaccaaaaaattaaagatgccattcaaagcagtgataatctatactggaacaaaatagaagagagtgttaatcttcttgatgagattgcgaaaatcttaagcacacacaaagatgacaaaaaaagcttagaggagctaaacaaaattattgataatccatctgtttgtaacgctctaataagcttgtctttttcaggtttcggacatataagtgtagaagctatgcgcaaaataaatccatatcttttagagggtatcgattatgataaagcctgtgaaatggcagggtatgattttaaagctatatttaaaggggacaaatcaacgcttcttccacctcttagcgaacaggaaaacttagaaatgacaaaccctgtcgtcaagcgcgctattgcacagatgcgtcttgtttataacgccataacaagaaaatacggtgcaattgatgccgtgcatgtggaatttacaagagatattaaaaaatcacataaagacagaaacgacataaaaaaatcgcaagaggagtttcaagcactcaaagaagaggcaaaagctgaagccataaaaatattaggcaaagagccaagtgcaaaggagctactcaaattcagactttggaaagagcaaaatggagagtgtatttatagtggagcttacataagcccttctattttagccgacccttatgcaacagaagttgaccatattctcccatacagtcgctctcttgatgattcgcttaataacaaagttttatgcctcacaaagcaaaatcaagacaaaggcaacaaaaccccttttgagtattttggagcagacaaagattctaaagaatggcaagaatttacaggaagagtagaaggtttaaaaaatattaagggtgccaaaaagggcagactcactaaaactaatttcgacgagagtagtgaaaatgcttttaaagagagaaacaaaaacgatacttcgtacatctcaaaatttgtaaagaactatatagaatcgcatgtggaatttaaagagtcaaaaatgaagcgccatgtctataccatgaatggcatgctcacctcacaacttcgctacaaatggggcgtaggcgataaaaacagagaaaatcatttacaccatgcggaagatgctatcatcctcgcttttgcaacgcaagcacaagtacaaaaactctcgacaacttcggcaaaaagagagggttttagttttaaaaacaaagaggaaaaagcaaaagagctaagatttgaaccgccgatggagaactttaacgaaaaagtcaaagaaagcattgaaaatatttttgtttcccacatgccaagacgaaaggtaagtggctcggcacataaagagacagtctacagcaataaaacacatagcgtgaaaaaagcagacggaaaagtagagtacctcaaaggcaacagcgtaaacaacaatgtcaaactcaaacatggcatagccctcaacgactcaatgccaagagtagatttgttccaaaacaaaaaaacaaacaaatactatcttgtaccaatctatgtaagtgactttgttcaagaaactctgccaaacaaagcgattgtagcgggcaacaaaccgtggttggagatggatgaggagtatgagtttaaattctctttttataaaagcgacctcatcgaagtcaaaacgaagaaaactgcaacaaaagagtctgttcaggttctggggtattttaatacggctgtaagttcaactgctcaagtagttattgatacacatgatggaaatgaagaatatagatatggcacccaaaatcttatctttgttaaaaaatatcaagtagatgcactaggaaattacatagaagtcaaaaacgaaaaacgacaaggaaccaaaaaacaaaacagataa

SEQ ID NO: 59 - DNA, 3114 bp, unidentified
  source 1..3114: mol_type = unassigned DNA
atgttcggaaaaatgcgttatcggcttgcactcgacttgggctcaacctcactcggctgggcaatggttcgtctcgataaggaaaatcaaccctgcgcagtcatcaaggcaggcgcccgaatcttttctgatggccgtaacccaaaggatggttcatcgctggcagtcacgcgccgagctgcacgcgccatgcgccgccgtcgcgatcgtctgctgaagcgcaaacagcgcatgatggatgcgctcatcaagcatggtttttttccagccactgcagccgaacgaaaagcactggaaacattgaatccctacgcgctgcgcgcaaaaggtctggacaaagcgctgacgcccgcagaattcgcccgcgccctgttccatatcaaccagcggcgaggcttcaagagcaaccgcaaaacagacaagaaagagaacgacagcggcgcactgaaaacagcgatccagaagcttcgcgaaagcctacagggggaaaactgccgcaccgtaggcgaatggctgaacaagcgtgacaattccggccaaacagtacgggcgcgctacagacaggagaagcacatcaaggaggatggcaaatccaaaatcgacaagtactacgatctctatatcgaccgcgccatgatcgaacatgagttcgatgaactctggagtaaacaggccgagcttgaccccgcacgattcaatgagaccgcccgtgctgaattaaaagacatcctgctgcaccagcgccccctcaagcccgtcaagccaggccgctgcaccttcctgccggaagaagagcgcgccccgctggcactgcccagcacacagcgattccgcatgtatcaggaagtgaacaacctgcgcatcctgcgcgatggattaaaggaggaacctctgacgctggaacaacgcgacacgctgatttttgcactggaagagaacaacaaatgctccttcacaagaatcaagaaattgcttggcttgagcggtgcagttcagttcaacttcgaagacccgaagcggcaggaactcaaaggaaacaccaccagcgccatcttggggaaaaaggatttgttcggcccggactggttcaagttcgatgaaaccaagcaggatgccatcgtgatgaaactgctcacggaggaaagcgaagagacacttgttcgctggctgcaaaatgaaacgggagttgatgaaaagactgccgaggccattgccaacgctggcctgccggaaggctatggcagtctgagcgcccaggctctggctcgcatcctgccggagctgcgccgcgacgttgtgacctatgacaaagccgtcaaagccgccggtttcgaacatcacagcaaacttggctccgataccgagatccctagcatcaccttcaaaacagagagaattgacctagacactggcgagataaaggcattccacatccacgacaagctgccctactacggcgaatacctgcaacgccacgtcggattcggcagtggcaagccggaagacactccggagaagcgatacgggaagatcaccaacccgactgtccatatcggtttgaatcaggtgcgactggttgtgaatgcacttatccagcgttacggccacccaagcgaagtaatcgtagaagttgcccgcgaactgaaacagaaccatgagcaacgcaaggaagagagcaagcgacaggcagagaatcaagatcgcaacaaacgactgcgcagcaacatagcaggcattcttaaaatcagcgaggagcaagtcagccgggacgatattgaaaaaatgatcttgtgggaagaactcagccatgacgtggccgatagaaagtgtccgtattctggcgtcccgatcagcgcttccatgctactcagctcagaggttgagatcgaacacatccttcccttctctcaaactttggacgacagccttaataacaagaccgtctccatgcgccaagccaatcgaatcaaaggcaaccgcacaccatgggaagcaaaacaggattttgaagcgcaaggctggaagtttgatgacatcctcgcaagggcaggaaacatgaagaaggagaagcgctatcgcttcgccgaggatggatacaagcgctggctgaaagacgatgcgggcttcctaccgcgtgcattgaacgatacccgccacttgagcaaggtagcacgcgaatacctgaccctgatctgcccgcaagccacgcgcgtcatccccggtcgcatgaccgccatgctgcgcgggaagttcggcctgaatgacgtgctgggactgaatggcgaaaagaaccgcaatgatcaccgccatcatgccgtggatgcctgcgtcatcgccgtaaccgatcaaggtttgctacaacgcttcgccaaagccagcgccagcgcacgcgagaagcaactgaacagactggttgagagcatgccactgccgtgggagaactaccgcgagcatgtgcaacgggctgttggaaatatcttggtcagccacaagccggatcacagccatgagggcgcgatgcacaacgacacagcctatggccttcgcgatggaggcaaggtcagcttccacaaaatggtggacggaaaacgcgagcgcacagaagaaagcctaaaggtcattaagatcagcgatgcgaaggccattgaacggcacggcgtccttccaacgggcgaaccaaagccctacaaaggctacaagggcgacagcaactattgcatcgagatagttagaaatgaaaaaggtaaatgggaaggggaagtgatatccacctttgatgcttaccagctggtgagacagcatggcatagagcggttgcggcacccctcgttaagcgtttccggaaaaccattagcaatgcggctcatgaagaatgattgcgtcaaactccaactagacaatgaaattattacttcgcgagtttgctgggttagaactgacacccgaattgcctttgcacctgtaagtgaggcaaacgttgacgcacgtgatcgagacaaaggagatcagtttagctacataattaaaactgcaagcgttctacaaaaattatgcgcccgccaaataactataacccccatcggcgagcttcacgatccaggcttcaaggtgtaa

SEQ ID NO: 60 - DNA, 3087 bp, unidentified
  source 1..3087: mol_type = unassigned DNA
atgcgtatctggggcttcgacgtcggaaccacctccatcggcttcgccgtcatcgactacgattccgaccggaaggctggccgcatcgaacggctgggcgtccgcatctttccggagggggtgaccgaagacaaaggcgaaccgcgtaacgcccagcggcgcgccaagcggatgatgcgccggcaattgcgacgtaagcgctggcgccggcgggcactgcatgaaatcctggctgaagccggactgctccctaccgacgatccgaaacagtggcccgcagaactggcgcaggccgatccttatgacctacgcgaccggggcttgagccagaagttatcaccgcacgaagtaggccgagccctcttccatatactcaagcggcgcggcttccagtcggcccgtatcgcggccgtcgagccatctgacccggccaaggagaaagaagacgaaggcatcaaggcagaaatcagccagattgccgccgagctgcaaggacgtacgttgggccagtggctgaagtcccagagcaaacgccgcgggcaccatacggcacggaccatgacgcaggaagagttcgagcgtttctggacggctcaagtcaaatatcatcccgacttgcttaccgacaatcttagggctgccctggctgaaacggccttccggcaacgtccgattttctggcgcctcaagaccctcggaacttgcctgctagaaaaggacgcaccgctttgcccgaagggcgcctggattggtcagcgcttcgaaatgctgcagacgctgaacaatttgcgattggcaggtggcaatgcccgccccctggacgaggatgaacgcaggctgctattggcggcattggaaacctccccgtccctttccttcccagctgcgcgcaaactgttgaagccggtctggcaacgcaatggcacatcgctcaaaacaaagttcaatttcgaggttgaaggcggcaagaaggctttgcccggcaatgcgctggaagcggcattgatcgacgcctttggcgaagcctggaatacgcaccccaaaaaagacgccatccgtgcggaactgcaagatcggctctgggcgatccaatacagaaagctgggcgagaagcgagtggaaatccgtgacggcaactccgccgaagccgaacgtcagcgcttcattgcgttcgcacaagcggaatggaacgccagccgaaaaaccgccgaaaccctgtcccgtatcgagccgccggctgcctggttacgccattcgatcaaggccatccaaaaattgctgcctcatatggaggccggcctcacctatgccgaggcccgcaagctcgtttacccggagcaattcgaaaaatcggaccccatagaaaagctgccgtcggatccgcggcaattcgaggatctgcgcaatcctacggtgaaacgtgccctgaccgaacttcgcaaggtcgtcaataacctgctcgcgacttatggcaaaccggagcgcattcgcatcgagcttgcccgcaacgtcgcgctgaccggtaaagataaagcgaattacatgcggacgcttgccgagcgcgaacggcagcgcaagcaggctgccaaggaactaaaggcatcccttggccgcgaacctaccgcaggcgatattgaaaaatggctgttatggcaggaatgcgaaaagacctgcccctacactttcgatagcatcggatttgccgacttattcggcaacatgccgcgatatgacatcgagcatatttggccgcgctcgttgagtctggacgattcctttgcgaacaagaccctttgccgacgtgacgtgaataacaagaaaggacaacggactcctttcgagctttacgccagcaatcatggcatagccgatctgccggactgggaagaagtgaagattcacctgcgcaataaggtggatgctggacatttccccgagagcaagtggaaacgcttcacgcgagagcaacctttcgcagcggcagacgacagaagcgacgaccggttgatcggcgataccgcttacattgcccgggaggcacgggcgtggctcggccaattgatgccgcgcggaattttcgacgtcgaaccgcgcaatggccgcatcgtgtcgcgtttgcgcaaattatggcatctggatcgcctgctcggcgaagacggaaggaaaaatcgcgacgatcaccgccatcatgccctcgatgctgcagtgaccgccctattcgatacccgggcgatgcaggacatcgtccgctggtataaagcgcaagaagaccgccccgaagaaaagccgccggcaatcgacctgccctggccggccttccgcgacgatctgcgtacggcgctggaggctatcgtcgtatcgcatcgcgttcgccgtaaggtgaatggaccgctgcatgacgaaacccggcttggcgatagcggcgagccgccaatacgcgaaggcggcaaggaatatcgcttctatgtcaaacgcaaagccttagcgcagatgagcaagggcgaaatagacgcgatacgcgacgagcgtatccgcacgctggcgcaagaacggctggccgcccatgacggcgatgtcaagaaagccttcgcgacaccgctcatgctacctggcagagctggaaaaccggatcgcgaggtcaagaaggccagagttattgtgaaatcgcaacctcatcttgtgaccgccctaaacggtggaaaagcctacgccgcggccagtgataaccatcacatggcgatctatcggtccattgacggaaaagtaagttacagaactgtcagccggatagaagcagcacgccgcactgctaggaaagagcccgtcgttcagcgagttctgccagatggcgcgcaactccttttcaccctaacaccaggcacaacactggcatttcccaacaacaacggccggccaatctatcgtgttgtgaccagcgtctgggactcagggcaaatagtcttggtggatcataccgaggctggagggacggtttggaaaaggcccaatgcgtcgagcttagtggctatgggggcaaaaaaagtttccgtcgaccccatcggccgggtcaggccggcccgcgattga

SEQ ID NO: 61 - DNA, 3027 bp, unidentified
  source 1..3027: mol_type = unassigned DNA
gtgcttggattggatatcggaactaactcgatagggtgggccctcatcgatacggatccgaccactggacgagccgtaggcatccgtgattgcggtgtacggatctttcaggaagccgtcgatgcgaagactaggaccccgaagaatgctgcgcgacgttcggcacgcttgctgaggcgcctgctagcgaggcgtgctagacgcaaacgcaagctgatgaacctgcttatcaagtacggacttttgcccccagagattgcagccgatgatgcgaaaccggagatcatcctaaacgcattgggtgatccgtacgagctgcgcacgaaggcgctcgatgagccattgcagccctacgagcttggaagagtcctcctgcacctgtgcgcccgacgcggctttctgtcaaatcgaaaagcacacctggttgcctatttggcggaggagttctcggattatctggcgcagatcgatgacaccgacgatgcagcaaactccagcgctagcacggaggatctaggaaaggtcaaggatggcataaagaaactgtcggaggagattcacgtatctgggtgccggacgctgggcgagtacctctatcgattggataggcacacacgcaagcgggctagattcacgagtcgccaaatgtatctcgacgagttcgagatgatctgggaatcgcaggcacgatacaaccctattctcacggatgatctgaagatccaagtgcatcaggtcatcttcttccaaagacctctgaagtcacagaagtccctggtgggtaagtgtctcctcgagccgggtcgtaagcgcacggccaaagcacgcctggaggcgcagcagtttcgaatctggcaggacatcaatcacatagagattcagaatccagaaaccagagcgtggcgccgtctcacgcaggaagagcgccaaaagctgtttcatgcgttacacgagaagaagtcgctcagttggagtggggtccgcaagctgctcggaattcacaggggagagcgtatcaacttggaggaggcaaaagacaagctgattggcaatctcacctggatagagctttcagaagcgttgggagatcgatggagtcgcatgagtgacacggagcgccagtcgctggtggaggatctgctcacgatttccgatttgacggctcgtgcccgcagactgcgcgagcattggaaactcagtagagaagaacagtacctgttgtgtacctgggagccgcaacccggctataccaatcattctttgaaggccattcgggcgatgttgccgtacttggagcgtggcgcaatctactctgaggcgcggcaggcggcaggctacaagtacgaggttcttcagcttaataagccgctgctgggtgagccgccctacgtgcgcaatcctgtggcccagaaagcgctctatcaggtgcgccgtgtcgtcaatgccgtcattcgtcgctacggcaagcctgcgcagatcatcgtcgagctggctcgagaaatgaagctgtcgaaaaagcaaaaaaaggccctcaacaaacaaaacaagcgcaaccgcgaggcgaaccaggaagcggctgagcaagttatccgtataacgggcgtcgagcatcctagctacgatgacaagctgaagtaccgtctttggaaggaatgtggtggcgtttgtccgtataccggcaaggccatcagtttacacgagctgttctcagacgcggtcgatatcgagcacatcctcccgtatcaccggacgctcgatgatagctacatgaataagacgatctgctgggcggatttcaaccgcaacgtcaagagaaatcaaacgccgtgggaggtgcttggtggcgatgcggacgcatggggacaattgctacagcgcattagatcgtggccgaaagccaagcgagaccggatggagcgaaggtcgctggatgggatcgaggactttatcaacaggcagctcaacgatacgcgactaatctgccgcgagacgctcggttatctgaaagagctgggggtagaggtatgtgtgtcacgcggcgcgctgacggccgacctgcgccatcattggggactgaacgcgttgctctccagcagcgaagacgaaaaggaacgaagagatcacagacaccacgcggtcgatgctcttgtgattgcattgacgacgcggcgccttttacagacgctttcggagctgtcgtcgaaacagggctcgcggtcgttaaaggatcgtctccgggtagggcttccttggccaagcttcagagaggatgcgaaactagcgatagagaagatcgtcgtgtcacacgcggcggcacggaagatcgcgggcgcgctacacgaggagaccgcatacggctgtcgcaaagatggacggtatgtgtaccggaagccgcttaatggtttgttcaaaagagaacacgcgaaggacattgtcgatccacagataaagaagattgtcttggagcatcttgatcggcatggcaatgatccgaagaaagcattcatcccggagaatctacccctcttgaaggatggcgcgggcttcaggccgatcaagaaggttagagtcttcgctaagcacagacccacttccgttttcgcggtccgcgatcggcacggacgagacttcaagtttttgaaatacggcagcaaccatcacttggaaatactcgagaatccttccacgggcaaacgagagatgcgcttcgtcacgactatggaggcagccgtacgtgcacgacgcaagaatgtgcccgtctatgaccgctccgcgcccgcaggatggaggtttctaatgagcttgggaattaacgatatggtcgaagtgaatcaggacggtggaaccgactactatcgtgtacagaagttagatggtggaaatcgacggttttacctgcgtcatcacgcctccgcaacgacagaggcgcgagaggaaggactggtcgtcagcacgaagagtttaccgttgatcgtgcgaaagttgtcggtagatccgattgggcagatttcgactgcaaatgattaa

SEQ ID NO: 62 - DNA, 4200 bp, unidentified
  source 1..4200: mol_type = unassigned DNA
atgaaaaaaattttaggactcgatttaggtacaaattccattggatgggcttacgtcaatgaagcggagaacacaaatgagcaatcgtctataattaaattaggagtgagagttatccctttaaccaccgacgaacaaaccaattttgaaaaaggtaagccaatcacaacaaatgcaagtagaactcttgcacgttcagccagaagaaacttacaacgttacaaactaaggcgagaaaatttaatacaaattctaaaagacaataattggataactgatcatactgttttgactgaaaacggaaataaatcaacatttgaaacctttaaattacgttcagaagcagctgaaagagcattagaattaaatgaacttgcacgagtactgctacatatcaacaaaaaaagaggttacaaaagttcacgtaaagtcaataatacggaagaaggacagcttattgatggaatggatattgctaaaaaactatatcatgaaaatataactcctggagaatttgtattggagctattaaaaagtggcaaaaagaaaattccagatttttaccgatctgatttaaacaatgaatttgaaaaaatatggaacaatcaagctaaatatcacccagacatattcacaaattcattgaaggatgaattaaaaggtaaaggcaaacaagctacttgggctattttaaaagatcctttaaaacttgtaggcgttaaacgagataaaaagcgtgatgaaataaaattagaaaattatcagtggcgagtagatgcattaacacagcaattgaactttgaacagattgctgtagttctacaagaaattaacggccaaataaataactcttcagggtatttaggagctatatcagatagaagtaaagaactttatttcaacaatcaaactgtaggacaatatttatattctcaactgaaagccaatccacatactcgattgaagaaccaggttttttatagacaagattatatggatgagtttgaaaaaatatgggaagtccaatcgaaaggacgtgaacatatttttacagataccttaaaatgcgaaattagagatgtcattattttttatcaacgtaaattaaagtctcagaaaggtcttatttctttttgtgaatttgaacaaaaagaaatttctgtaggagataaaaagaaaatagtaggattaagagttgctccgaaatcttccccactttttcaagaatttaaaatctggcaaaacctccataatgttaagattaaaaacaaaaacactaaagaagtattggtattaaatcaagatgaaaaaaactgtttgttttccgaacttaatgtaaaaggaaaacttaccgctaatcaagtcttaaaattaataaaaggcaatcctaaagattgggaaatcaactatacagaattagatggtaatagaacaaatcaagcattattcgatgcatacctatctatattagaaattgaaggctatgatgtacgagaagaactaaaattaaaattaaacaaagatgatatcacattagccgatattgacaaacctgcagctgaaattatgcatatggttgaaactatttttaaacatttaaaaatagacacgaacatattacattttaatcctctaattgaagggaattcattcgaaaaacaagcatcctaccaattgtggcacttactctattcttacgaagaagataactctccaactgggatggaaacactttatcgtcttttaggcgaaaagttcggatttaataaagaacaagcaaaaattattgccaatgtctcttttcaggatgattatggaagtttaagtagtaaggctattcgtaaaatattcccttatattaaggaaagcgacttctcaacatcttgtgaactagcaggatataatcactctaaaaactctttaacaaaagaggaaattgaaaaacgtgagttaaaaactcgtctagaaatcttgccaaaaaacagtttaagaaatcctgttgtagaaaaaatcttaaaccaaatgataaatgtagtcaataccattattgatactgaaaacgataaacttgaacaggatggtaaaattagaaattttcaatttgatgagattcgcattgaactagctcgtgaattaaagaaaaacgcaaaagaacgagaagatttgtcaaaagccattaatacaggtaaaatagaacatgaccgcataataaaaatccttcaaaatgaagatggaattaaattccctacacgaaatgatatcattcgttacaaactttaccaagagttaaaaaacaatagttataaagatctatacactaatacatatattgagcgaaaagatttatttactaacaaatacgacatagaacatattattcctcaatctcgactttttgatgatagtttttctaacaaaaccatagttcctagacaagtaaacttagagaagggaaatagaactgcgtatgattatatcttagaagtcaaaggggaaaaagcggctgaagaatatactcaacgtattgaacatatgtatacccaaaaagaagacggaatatctaaggctaaatataaaaagctattaatgaaagaatctgaaattggaagtggttttatagaacgtgacttaagagattcacaatatattgcgaaaaaagccaaagaaatactcttccaaattaccaaatctgtggtatctacttctggttctataaccgatcgtttacgtcaagattggggattaatagacgtaatgaaggaattaaatcttcctaaatacgaaaaagcaggtttagttgaaattcaacatgacaaaaacgggcaacccaaaaaggtaataaaaaactggactaaacgcaatgaccaccgccaccacgcaatggatgcgttaacagtagcatttactaaacatagtcatattcaatacttaaacaacttaaacgcgcggaaaaatgaagattcagaaaagaaggcgaacatatatgctattgaagaaaaagaaacagtaaaaattaatgatggaaaaggaaatagtaaacggattttcaaagagccaatattaaactttagagatgaagctaaaaaacatttagaatgtgtattggtctctcataaggctaaaaacaaagtagtcacaagaaatattaataaaattaagggctctgataaaaaacaaatagctttaacccctcgtggtcaaatgcataaagaaaccgtttatggcagaataaagcaatacaattctaaaatagaaaaagttagtgcaaaatttgatgaagatactattgctatggtttcaaatcctcaatatagatctttattattacaaagacttaaagaaaatgggaatgaccctaagaaagcatttacaggcaaaaatgccttagataaagctcctattctacttaaaaatggtactccgttacctgataaagtaaaactgatttggttagaagataacttcaccatccgcaaggaaatcaatccagacttaaaaattgataaagttatagatgaaggcattaaacgaattttacaaaagagattagatgaatttaaaggcgatccgaaaaaggcttttgccgatttagaaaacaacccaatttggcttaataaggaaaaaggaattgcaataaaacgtgtaacgatttcgggtgtaaaaaatgctgaagctttacatactgctaaagatcatctaggaaataaacgtttagacaaaaatggtcaagaaattccagtggattttgtaagtacaggaaataatcaccatgtagcaatatatgaagacgaaaaaggtaacctacatgaaaaagttgtctcattctatgaagcagttgcaagggtaaaccaaggacttcctattattgataaatcttataacaaagaccttggttggaagtttttattcactatgaaacaaaatgaaatgtttgttttcccatcaaatgattttaatccaaaagaaattgatttattagacaaaaagaaccaagcgctaataagtaaatatctatttagggtacaaaaattttcagaaaaggattacaattttaggcaccatttagaaacacaaattattgatactcctcaattaaacaacataatagcaattagaaaaagaaatccaaattctttaaaaggagttattaaaattagaataaatcatgtaggagatattatacaaattggtgaatattaa

SEQ ID NO: 63 - DNA, 3375 bp, unidentified
  source 1..3375: mol_type = unassigned DNA
atggattccaaaaaaattctcggactggatctgggaacaaatagtattggctggtcactggttgaaatcaatcgggaagaaaatcaaggtcgcattttaggaatgggtgtgcgtatattccctgagggtgttgaaaacttaaatcagggagaaaaggagatttcaaaaaatgccgcacgcaatgttaacagaagtgcacgccggcaaattcagcgaagaaaaaggagaaaaactgatctgctgaaaattttaattcagtacgacatggctcctcaaggggattttaaggatcaggcatattggctatctcctgaatttttgaaatgggtagcactaaacccttatgaactgagacatcgcgccattactgaaaaaattgcactcaaagaacttggtcgcgtattctaccacctggcacagcaccgtggcttccaaagcaatgcccgcaatgtatcagataatgacgattcaaccatttacaaaggcggtaatggcatgaccggcattgatacaacagcatcattgattgaaaatgaaacacttgggtcggcactatatcaaaagctttttccagctcctggacaacctttcaaatatttcccggaaagaatccgccgtcgatatacaacccggaaaatgtatattgatgagtttgagaaaatctgggaagagcagagtcgctttcatcctgagttgacccaacaacttaacgaagaaatagggggcaggcgtcgcgaaggatataaacgagacggtgtattattctttcaacggcctttgcgatctcaaaaaagcaagattggcaaatgtacctttcatcctaataaaagtcgtagggcaatcagcgcaccagacttcgaagaattccgcatctggcagtttattaactccattagatgtaatggcgaatctctagttgatgcggacaggcaacttgtatataacctgctggtaagtcaggacagggtaaaatttgacaaactgagaaaacatcttggcaaggcgagtgcggcatattcgtttaatttcgatgatgaaacttcctgtccaaatgctcctacattacgatttctgtcatcaagagggatttttagtcaatcatggtttggattcaaaaagtcaaagcaggaagaaatatggcacgatctctatttctatgatgacaaagaattacttcgtaaacgtgcccaggaaaaatggggcttaagtgaggatgccgcgacaaagtttggagattattccttgaagcaaggttttgcttcacttagccgacgagcgattcaaaatattttgccctttctggcattaggtcatgattacgatgtagcagtaacactgggtggaatcaaaaacgcccttggagatcaaaacattgttgacatatacgacaccgatttccgaattgctgtagaggaaattgttcgtaccaatccccgaggtggttatataaatcatcttaaggcatggcttaaagacaactatggttttgaagataagcgtttggaaaaactctatcaccattctgccgatgtaaatgaacgaaaattactgaaccgccttccttacggcatggaagctgaccgacaaatccaacaattgcgcaaccccatcgtcatccaggccttatttgaattgagaaaagttatcaatgaattacttgagcgattcggcccattcgacgaaatcaagattgagttgggccgggacttgaaaaacccgaagaatcgcagactggaaattcagcgacaaaacaagcgacagcagcaatatcatgaaaaggtaattgataggctaagagagctcggcatagatgaaacctatgacaacgtcctcaagtataaactctgggaagaatgcaatgccacctgtccgtatacaggaagaccgatcgctgtcaatcaattattttccaatcagatacagattgaacatatcattccttacagtcggtcgctcgatgatagcttcatgaataaaaccctgtgcttctcagatgaaaatgctagaaagggtgaccgtacaccatatgaatactatcatggagttttaggatctgaaaagtgggtagatgtcaaacaacgagcactatcgctcttcaaaaacagcagggatttcccaaatcggtataaaaaattcgagcgatttgttctgacaagcacacaagaccttgaaggatttatcagccgccagctcaatgacacccgctacatcagccgggaagcagcagaatatttgaggcaaatatgtcctaaagtctgggtggcctcagggcagttaacagcccgactccggcatttatggggactaaactccattatagatgataaaagcaatcaaaaagatcgctccgatcatcgacatcatgccattgatgctttagttgtagctgttcatacacaccgcgatctccagttgatgtcaaggctcaatcgccatggcatcagtccggacagtttggcagatgcgtttccattcccatggcctggctttcgttctgatgcagaaacctatgtgagcaatatcctggtatctcataaaaccaaccatagagtcgtttctacacgactgaccataacaagaagcaaaggcaaggttttcagaaataaatcttctgctgcaagaggagcacttcacaaagaaaccgtttatggcaagagaaaactgttagatggtagttataaataccatgttagaaaatcactcgaggatatcaaagaaaaagcacaggtagataagatagttgatcaaaaaattaaagacctcgtcagaaaccgcttgagggaacttggggtggatataacgatgaaaaaatataaggtcccaccaggtgcattcttttcaaaagatgaaaatgggcaaatattacccctgatttggttaccaaacaatcgaggtggaaaggttcctgtctattctgtgaggatcaatgaagaattaggcaatgctgctcaattaaaatcttctcaaaatcaatatgtaaatccaagaaacaatcaccacatattgatttacaaatcgaaaaatggcatcctaaaggaggacatcatttcattctgggttgctgctgagcgcatccgacaaaagtctccagtataccagatacctgctgattgcgaggaaattatcgcaattcttcgaaaaaacgatatgtttttaattggatgggatatttctatcccagaaaattctactgaaatcctatcaaggcatttatatagggttgataacctaagctctttggattatgtttttaaacaccatttaactgacaatgatgaagaaaaggtacgaatccagagttttaaaaaatggcaagagttaaatcctattaaggtcagaatttcatcaactggcaaggtgatcggtttggtatag

SEQ ID NO: 64 - DNA, 4077 bp, Acidaminococcus intestini; identical to SEQ ID NO: 44
  source 1..4077: mol_type = unassigned DNA

SEQ ID NO: 65 - DNA, 4155 bp, Coriobacterium glomerans
  source 1..4155: mol_type = unassigned DNA
atgaaattgcgggggattgaagacgactacagcatcggcttagacatgggtacgtcatcggttggatgggcggtgacggacgaacgagggacactcgcgcacttcaagcgaaagcccacatggggaagcagactcttccgagaggctcagaccgcagctgtcgcacgcatgccgcgcggtcagcgaagacgctatgtcaggcggcgatggcgtctcgaccttcttcagaagctcttcgaacagcagatggagcaggccgatccagactttttcattcgactcagacagtccaggttgctgcgggacgatcgcgcggaggagcacgcggactatcggtggccgctgttcaatgattgtaagtttaccgaacgcgactattatcaacgctttccgacgatctaccatgtacgcagctggcttatggaaactgacgagcaagcggatattcgtctgatctatctcgcattgcacaatatcgtcaagcaccgtggcaattttctgcgagagggacagagtctgagcgcaaaaagcgcccggcccgacgaggcgctcaatcacctccgagagacgctccgggtctggagctccgagcgcggattcgaatgctccattgctgataacggcagcattcttgccatgctgacgcacccggacctctcgccctccgacaggcgaaagaagatcgctcccctgttcgatgtgaaatccgacgacgctgcggccgataagaagctcggaattgcgttggccggtgctgtgatcggactcaaaacggagttcaagaacatcttcggagatttcccctgcgaagactcgagcatctatctttcaaatgacgaagcagtggatgcggtccgatcggcttgtccggatgactgcgccgaactgttcgatcgactgtgcgaggtctactcagcatacgtgcttcaaggtctgctgtcgtatgcgcccggacagaccatctcagccaatatggtagagaagtatcgccgttacggtgaagatctcgcgttgctcaagaaactggtcaagatctatgctcccgatcagtaccggatgttcttctccggtgccacctatccagggacgggtatctatgatgccgcccaagcacgcggttacaccaaatacaatctcgggcccaaaaaatcagaatacaagccaagcgaatccatgcagtatgacgacttcagaaaagcggttgagaagcttttcgccaaaaccgacgctcgtgctgacgaacgctatcgcatgatgatggatcgatttgacaagcagcaattcctccgtaggctcaaaacaagcgacaacggaagcatctatcatcaactccaccttgaagagctcaaggccatcgtcgaaaatcaagggcgcttctatccgtttctcaagcgggacgcagacaaactcgtctcgttggtctcatttcgcatcccctattatgttggaccgctttcaacaagaaacgcccggaccgatcagcatggcgagaatcgattcgcatggtccgaacgcaagccgggtatgcaggacgagccgatctttccatggaactgggagtccattatcgatcggagcaaaagcgcggagaagttcattctgcgtatgacggggatgtgcacgtaccttcagcaggagccggttttgcccaagtcgtctctcctatacgaggagttttgcgtcttgaatgagctgaacggcgcccattggtccatcgacggtgatgacgagcatcgcttcgatgccgccgatcgagaaggcatcatcgaggagctcttccggcgcaagcgcacggtgagctacggcgatgtcgccggctggatggagcgcgagcgaaatcagatcggagctcacgtgtgtggcgggcagggagaaaaaggattcgaatcgaaactcggatcatatatattcttctgcaaggacgttttcaaagtcgaacggctggagcaatcagactatcccatgatcgaacggatcattctgtggaatacgctgttcgaggatcgcaagattttaagccagcgcctcaaggaggagtacggcagcaggctatcggctgagcagataaaaacaatctgcaaaaaacgtttcaccggttggggccggttgtcagagaagtttctgacgggcatcaccgtgcaggttgatgaagacagcgtatcgatcatggacgttttgcgcgaggggtgccccgtctcgggcaaacgcgggagagccatggtgatgatggaaatcctgcgcgatgaggagctgggctttcagaagaaggtggatgatttcaacagggcgtttttcgctgagaatgcccaagcgctcggagtaaatgagctgcccggttcccccgccgtccgcagaagcctcaatcaatcgatacgcatcgtcgatgagatcgcatcgattgccggaaaggcaccggcgaacatcttcatcgaggtcacaagggatgaggatcccaaaaagaagggcaggcgcaccaaaaggcgatacaacgacctgaaagatgcgcttgaggcattcaagaaagaggatcccgagctatggcgagagctttgcgaaacggctcccaatgatatggacgagcgtctgtcgctctatttcatgcagcgaggcaagtgcctctattccggacgcgcgatcgatattcatcagctcagcaatgccggaatatacgaggtcgatcacatcattccgcgcacctatgtcaaagacgacagtttggagaacaaagcactggtgtatcgagaggagaaccagcgcaagaccgacatgctgctcatcgatcccgagatccgacgacggatgagcggatattggcgcatgcttcatgaggccaaactcatcggagacaagaaattcagaaacctgctgcgctcgcgcatcgacgacaaggcactgaagggtttcatagctcgccagctcgttgaaacaggccagatggtcaaacttgttcggtccctcttggaggcgagatatccggagacgaacatcatctccgtgaaggcgagcatctctcatgacctacgcacggcggcagagctcgtaaagtgccgtgaggcaaatgattttcatcatgcgcatgacgccttcttggcatgtcgtgtaggactgttcattcagaagcgccatccatgcgtttacgagaaccccatcggtctgtcccaagttgtcagaaactatgtcagacagcaagcagatatcttcaagaggtgccgcaccatcccgggttcaagcggcttcatcgtcaacagcttcatgacctctggatttgacaaagaaaccggcgaaatcttcaaggatgattgggatgcggaagcagaagtcgagggcatccgtcgctcgttgaattttcgacaatgtttcatcagtcgcatgccattcgaagaccatggggtcttttgggacgcgacgatctattctccgcgcgctaagaagaccgcggcgctgcctttgaagcaagggctcaatccaagcagatacggctctttctcgcgtgaacagtttgcttacttttttatatataaggcacggaatccaagaaaggagcaaacgctgttcgaattcgcccaagtccccgttcggttgtcagcgcagatcaggcaagatgagaatgcgctcgagcgctacgcgcgcgaacttgccaaggatcaaggcctcgagttcatccgaatcgaacgatcgaagatcctgaaaaatcaacttatcgaaatcgatggcgaccggctctgcatcacagggaaagaagaagtccgcaatgcttgtgaacttgccttcgcacaagatgagatgcgcgtgatcaggatgctggtaagcgagaaacccgtttcacgagaatgtgtcatatcgttgttcaataggatcttgttacatggtgatcaggccagtcgaagattatccaaacagctgaagctcgcgttgctttctgaagcgttttccgaagcctcggacaacgtacagcgtaacgtggtgctaggacttatcgctattttcaacgggtcaaccaatatggtaaaccttagcgatatcggaggaagcaaattcgcgggaaacgtgcgaatcaagtataaaaaagagctcgcaagcccaaaggtcaatgtccatctcatcgatcaatcggtaacaggaatgttcgaaaggaggacgaaaattggcctttag

SEQ ID NO: 66 - DNA, 4143 bp, Eggerthella sp.
  source 1..4143: mol_type = unassigned DNA
atgaatttaagacatgtcggtaattacaacataggtcttgatatgggaacggcttctgttgggtgggctgccatagacgagcagggagagttgcttcattttaaaggtaaacccacttggggtagtcgcctgtttgattcggcaaatacggccgcaacagcacgtatgccgcgagggcaaagacgtcgctacattcgtcgcaggtggcgacttgatttactccaaaagttcttttcggaagaaatggctgaaaaagaccccgagtttttcattcgcttgcgccaatcgagcttatggccagaagatcgggaaggtgggcataccgcctaccattggccgctgtttaatgattccgattttaatgaaaaggaatactacgaaaagtttcctactatatttcatttgcgtcagtggttaatggaaaccgatgaaaaggccgacattcgtcttatctacttggcatttcacaatatcgtaaaacataggggtaatttcttgcaggaaaacaacgactcgttaagcgcacaaaatgcgaacatgagagaatcgttagagtcattctgcatagcattagaagaatggtgtgacgaaaaagaactaacatgttcttgtgatccacagaaacttgagcatcttttcaaggaagtgaaataccgttcggatattcgtgatggttttgctgctctgcttggtctagcttgttcaggtgaaaacgaagtagacgtaaaagctatggcaaaagaaatggggaaggcgatcgtcggctacaaagccgacttctccaagatttttaccgagtgcgacaaagaaggttcgtcttttcgactttcagatgatgagggacccgaggcatttttggacatatgccccgatgacggaatagccctttttgaagcgatccaaatggtgtactcctcgtttattctgacgggaatgttgaccgaaaagggcctgtcgttaagtaagatttctgcctacaaccaatacggccaagacttagaatcgcttaaagcactggtaaaagaatacgtccccaatgaatacagtagcttttttcgtggaccgacctattctggttcgacggaatatgacccctcaaaagctcaaggatatacgcgttacaaccttggaccaagcaaaaagggttctggggcaaagcctatggcttacgaagatttcaagaagagcgtcgaacagctttttgctaacacgaatgctattaacgacgagcgttacaaagaaatgatgggacgctttgcggaagagaagtttctcaggcgattgcgaactagtgataacggtcgtattcctttccaacttaatcttgaagaaatgaccgcaatcattataaatcaaggaaagtattatccatttttgcttgaacagcaagaaaagcttgagtcgctcgttagatttcgaattccctattatgtgggaccccttacgaggataaatgcgcgtcttgatagcaagggcaatgcgtgttttgcttggtcaaagagaaaagatggcatggatagtgcttcaattaagccttggaactgggatgaagttatagataagcacgcgagtgcacaagcttttattgaacgtatgacgggaacttgtacctacttgcgcggagaacctgttttgcctcgctgctcgcttctctatgaggagtattgcgtgctgaacgagctgaacggtgcccgttggactcaagatggcgataagtttattcggtttgactacaaggatcgctcagacattatagaagagctcttcaaaaaacgtcgcgggcgtattcagtatgcagcggtggcagattggatgaagcaggagcgtagtcatgccaatgtgcatgtttcgggcgggcaaggcgaaaacgcctttgagtctcgcttgagctcctatcattttttctgcaatgacgtttttggagttgacgagctgcctggctcgtatgttgacatggttgaggaaattatcttatggagtacgctttttgaagaccgctctattctgcgtgaagaaatacagcgcaagtatggcgatgtattaaatgaagagcaaatcaagactatctgcaaaaagcgttttagcggctggggaaggctctcaagaaagttactctgcagtctaaaagcgcaaaccgacaatggaccaaaatccattatggatattcttcaagaaggtgatcaaaacaacggtcgcgtcggccgcgcgatggtgtttcaagaaattcttcacgatgaacagttgggttttgagcagaaaatcgaggaagaaaatactcagagcatgctagaaggcgaaaacttgctcattgaagatttacctggttcccctgctatacggcgttcgattaaccaagcggtgcgtattgtcgatgaaatagtgggcattgcaggacatgcgccggacaacatctttatagaggtaacccgcgaagacgatacaaagaaaaagggtaaacgaacgactacgcgctacagtaatattcaaaaggcgctagaagcacttaaggaagagggtgccgaggctctgcgcgagctaaaaacgtataaacataacgaactagacaagcgcctttcgctttactttatgcaaaacggcaagtcgctttactcgggtatccctctggatatacggcggttgagtgagtaccaaatcgatcatattatcccgcagtcttatataaaggacgatagttatgaaaacatggctttggtattgccgggcgagaaccaaagcaaggcggacaaccttttaatttcgcaggatatccgcataaagatgaaggcaacttggactgctttgcataaagcaggacttatgggcgataagaagtacaacaacttgatgaattcgtctatctcagatgcgaagatgaagggttttatcaatagacaattggtagaaacaagccaaagtgtaaagcttacgcaaatgatgttgtctcagaagtatcccggtgcaaaagtccgtcctattaaggcgagcatttcatcgcagctgcgtgatgcatgcgaccttgtgaaatgcagggaggcaaatgattaccaccatgctcacgatgcttatcttgcctgtcaagttggacgctttgtgcttaagcgacacagcagtatgtttgacaatcctatcggaatgacaaaggttattcgcgactttgtaaaaagacaagggcaagaattcaagagaaatggaaagctgccagcttatgcgagtcgttcagggtttattgttcagagtttcatgcgttcgggatttgatgcagaaacgggagaattgttgcgcgatgattggaacgctccatttgaaatagctcggattaagcgttgtttgaattatcgagattgctatatttctcgtatgcccatggaggattcgggtgcattttgggatgcgacaatctattcgccaaaggcaggaaagaagggggctctcccggtaaagcagggtttaccagtagaaaaatatggcagttattcgcgcgagcaatttgcctacttctttgtatacaaggcctacaatcctaagaaaaaggcctatcggcttgaatttgaggctgtaccggttagggttgcttctgcggtagagacgcgtgaaaacgcgctcgaggagtacgcgaaaagtgtcgctaaacaagcagggcttgagtttgtggaagtggctcggcctaaggtctacaaatatcaactcatagaacttggagaggatcgtttgtatattacgggtaaaagggaagttcgcaatgcctcgcaacttgccttttcgctcgatgagattgaccttttgaagcgattagctgaaggggaagaaacttcctccgaagaaagagagcgattgtttgatgttctgattgagaaatatgcacgatatgcaccgaggttagctcgtcagttgagcgtagatagtatgagtgcaacgttcgaaacgcttaatgctgaggagcaattgggtattcttctatctttagtagaaattgcaaatggaaaaagaaacatgattgatctttcgagtgcagggggtagcaagaatgcgggctgtatgaaccctactttttccagtgaattgtcttctcccggctccaactttacttttattgaccaatcggtaaccgggatgttcgaaaggcggcagcgccttgagctttag

SEQ ID NO: 67 - DNA, 4047 bp, Finegoldia magna
  source 1..4047: mol_type = unassigned DNA
atgaaaagcgaaaaaaaatattatatcggattggatgtaggtactaatagtgtaggatgggctgtgactgacgaattctataatattcttagagccaaaggaaaagatttgtggggagtaagattatttgaaaaagcagacactgcagcaaacacaagaatatttagaagtggtagaagaagaaacgacagaaaaggtatgcgtcttcaaattttgagagaaatttttgaagatgaaatcaaaaaggttgacaaagacttctatgacagacttgatgaaagcaaattctgggctgaagacaagaaagtatctgggaaatattcgttatttaatgataaaaatttcagcgacaagcaatattttgaaaagtttcctactatttttcatcttagaaaatatttaatggaagaacatggaaaagtagacattagatactattttctagctatcaatcaaatgatgaaaagaaggggacattttctaatagatggtcagatttctcacgttacagatgataaaccattaaaagaacaacttattctattaataaatgatttattaaaaatcgaattagaagaagagcttatggattcgatatttgaaattttggcggatgtgaacgagaaaagaacagacaagaaaaacaatctaaaagagcttataaaaggacaagattttaataaacaagaaggtaacatcctaaactcgatttttgaatcaatagttactggtaaagcaaaaataaaaaatataatttcagatgaagacattcttgaaaaaataaaggaagataacaaggaagatttcgttcttacaggagatagctacgaggaaaatctccaatattttgaggaagttttacaagaaaacataacattgtttaacacacttaaatcaacatatgattttttaatccttcaatctattttaaaaggtaagagcacactttctgatgcacaagtcgaacgatacgatgaacataaaaaagacctcgaaatacttaaaaaagtaataaaaaaatacgatgaagatggaaaattgttcaagcaagtattcaaggaagataatggaaatggatatgtttcatatattggatattatttgaacaaaaacaaaaagattaccgcaaagaagaaaatatcaaatattgaatttacaaaatacgttaaaggaattcttgaaaaacaatgcgactgtgaagatgaagatgttaagtatttattggggaaaatagaacaagaaaactttctattaaaacaaatatcatccataaattcggttattccacatcaaattcacctttttgaattagataaaatattggaaaacttagccaaaaactaccctagctttaataataagaaggaagaatttacaaaaatagaaaagatcagaaaaacatttacatttaggattccatattatgttggaccattaaatgattatcacaaaaacaatggcggaaatgcttggatattcagaaataaaggcgaaaaaataagaccatggaattttgaaaaaatagttgatcttcataaaagtgaagaagaatttatcaaaagaatgctaaatcaatgcacttatcttccagaagagacagttcttcctaaatcttctattctttattcagaatatatggtgctaaatgaattgaataatttgaggattaatggaaagccactagataccgatgttaagttgaaattaattgaagaattattcaagaaaaagacaaaagtcactctcaaatcgatcagagattatatggtaaggaataactttgcagataaagaagactttgataattcagagaaaaacttggaaatagcatccaatatgaaatcatatattgattttaacaatatattagaagacaagtttgacgtagaaatggtggaagatctcattgagaaaattacaattcatacgggaaataagaaacttttgaaaaaatacatcgaggaaacttatcccgatttatcaagttctcaaattcaaaaaattatcaaccttaaatacaaagattggggaagattatcaagaaaattattagacggaataaaaggaacaaaaaaagaaacagaaaagactgatactgtaattaatttcttgagaaattcaagtgacaatttgatgcaaataattggaagccaaaattacagctttaatgaatatattgataagttaaggaaaaaatatattcctcaagaaataagttatgaagtggttgaaaatctttacgtatctccatctgtaaaaaagatgatatggcaagttataagagttacagaagaaatcacaaaggttatgggatatgacccggataaaatcttcatagaaatggcaaaatctgaagaggaaaaaaagacgacaatttctagaaaaaataaattactagacctatataaggcgataaaaaaagatgaaagagatagtcaatatgaaaagctattaacagggttgaataaattagacgatagcgatcttagaagcagaaaactttatctttactacactcaaatgggtagagatatgtacactggcgaaaagattgacctggataaattattcgattctacacactacgataaagaccacataatacctcaaagtatgaaaaaagatgattcgataataaacaacttggtattagtaaataaaaatgcaaaccaaaccacaaaaggcaacatataccctgtaccatccagtataagaaacaatccaaagatttacaattactggaagtatttgatggaaaaagagttcatcagcaaagaaaaatacaatagattaataagaaatacaccactaacaaatgaagaacttggcggattcatcaacagacaacttgtagaaacaagacaatcaacaaaagcaatcaaagaattatttgaaaagttctaccaaaaatcaaaaataatacctgtaaaagcaagtcttgcaagtgatttgagaaaagacatgaatacccttaaatccagagaagtaaatgaccttcaccatgctcacgatgcgtttttgaatattgtagcaggagatgtgtggaatcgagagttcacatcaaatccaataaattatgtcaaagaaaacagagaaggtgacaaggtaaaatattcgttaagcaaagattttacaagacctcgtaaatccaaaggaaaagttatctggacacctgaaaaaggtagaaaattgattgtagatacattgaataaaccatcagttctaatcagcaatgaaagtcatgtaaaaaaaggagagttattcaacgctaccattgcagggaaaaaggattacaagaaaggtaaaatatatcttccactaaaaaaagacgatagattacaagatgtatcgaaatatggaggatataaggctataaatggagcgttctttttcttggtagagcatactaaaagcaagaaaagaataagaagcatagaattatttccgttacatttgcttagtaaattttatgaagataaaaatacagtattagattatgcgataaatgtattgcaattacaagatccaaagataataatagacaaaattaattatcgtacagaaataattatagataattttagttatttaatatccactaaatcgaatgatggtagtataactgttaaaccaaatgagcaaatgtattggagagttgatgaaatttcgaatttgaaaaaaatagaaaataaatacaaaaaagatgccatattaacagaagaggatagaaaaattatggagagttatattgataaaatctatcaacaattcaaggcaggaaaatacaagaatagacgcactactgatacaataatagaaaaatatgaaataatcgatctagacactctagataataaacaattataccaattactggtagcttttatttcactttcatataaaacatcaaataatgcagtggactttactgtaattggactaggtactgaatgtggaaagccaagaattacgaatttacctgacaacacatatctagtatataaatcaataacaggaatatatgaaaagaggataagaataaaataa

SEQ ID NO: 68 - DNA, 4086 bp, Lactobacillus rhamnosus
  source 1..4086: mol_type = unassigned DNA
atgacaaaattgaaccagccatatgggattgggcttgacattggttccaattcgattggctttgcggttgtggatgcgaatagtcatctcttgcggctgaaaggagaaacagccatcggtgcacggctatttagagaggggcaatcagctgctgaacggcgggaaagtcggacgactcggcggcgtttgagtcgaactcggtggcgcttaagctttttacgcgatttctttgccccgcacattacaaaaattgacccggatttcttcttgcggcaaaagtattccgaaatttcgcccaaagacaaggacaggtttaagtatgaaaagcgtctgtttaatgatcgaacggatgctgaattttacgaggactatccgagtatgtatcacttgcgtctgcatttgatgacgcatacgcataaagccgatccgcgtgagattttcttggcaatccatcatattttgaaaagtcgcgggcattttttgacgcccggtgctgctaaagactttaatacggataaagtcgatttagaagatatttttcctgccttgacagaggcatatgcgcaagtttatcccgatcttgagttaacttttgatttggcaaaggctgatgacttcaaggcaaaattgctagatgaacaagcgacgccgagcgatacccagaaggccttggtgaacttgttattaagcagtgatggtgagaaagaaatcgtcaagaaacgcaaacaagtgctgacagagtttgccaaagcgatcacagggctaaaaaccaagttcaatcttgctttaggtacagaagtagatgaagctgatgcgtcaaattggcaattctcgatggggcagctggacgacaagtggagtaacatcgaaacttccatgaccgatcaaggaacggaaatatttgaacaaattcaagaactttatcgagcacgattgctaaatggcattgtgccagcggggatgagcttatcccaggcaaaagttgctgactatgggcaacataaagaagatcttgagctgtttaaaacctacctcaagaaactaaatgatcacgaattagctaaaacaattcgaggtctttatgatcgatatattaatggcgatgatgctaagccttttttgagggaagactttgttaaagccttaaccaaagaagtaaccgcacacccaaatgaagtgtcggagcagctgttgaatcgaatgggacaggcaaacttcatgctcaaacaacgaactaaggccaatggtgcgattcctgtccaactgcaacaacgtgaactagaccagattattgctaatcaatccaaatactacgactggcttgccaaaccgaatccggtagagaagcatcgcgctagcaaaccttatcagctagatgaactgttaactttccgaatcccttactatgtaggaccactgatcacgccaaaagaacaggccgagtcaagagaaaatgtctttgcatggatgatccgtaaagatccttcaggcaatattaccccttacaattttgatgaaaaagtcgactgtccagcttcggcaaacatgtttatccaacgcatgaaaaacaccgatacttatttgattggcgaagatgtcttacctaaacgaagcctgttatatcaaaagtatgaagttttgaatgagttaaacaacgtcagcattgatggtaggaggcttggcgcagatcaaaaacaacgcttgatccgcgaagtgttcgagcgacatagcagcgtgaccattaaacaagtcgccgaaaatctagttgctcatggagattttgccaaacgcccagagattcgtgggctggcagatgagaaacgcttcttaagttcgctttcaacctatcatcaattgaaaaagatcttacatgaggcaattgatgatccgaccaaagagcatgatatcgaaaatattattacgtggtcgacagtttttgaagatgccgcaattttcaagaccgagctggctaaaattagttggttggattcagatacaatcaaggcattaagcaacatccgttatcgtggctggggtcagttctcgcgcaagcttttagatgggttgaaactaggcaatggccacaccgtaattcaggaattaatgctttcgaatcataacttaatgcaaattttgaccgatgaaacgttgaaaacaacgatggcggaattaaatcaagacaaactgaaggcagacgacattgaagatgtcattaatgatgcatatacttcgccaagcaataaaaaagctttgcgtcaagtgttacgggttgttgaagacatcaagcatgcagcaaacggtcaagatccaagttggctttatattgaaacggcagacggaccaggcactgccggtaaacgcacccagtcacggcaaaagcaaattcaaacagtttacgctaatgctgcccaagagctgattgatagtgctgttcgtggtgaattggaggataaaattgctgacaaggccagctttaccgatcggctagttctttacttcatgcaaggcgggcgggatatttataccggcgcaccgctgaatatcgatcaactcagccattatgacatcgatcacatactgccacaatcgttgatcaaggatgactctttagataaccgtgtgctcgttaacgccaccattaaccgcgaaaagaacaatgtatttgcttcaactttgtttgcaagcaagatggcagcaacttggcgtaagtggcacgaagccggtctaatcagtgggcgtaaactcagaaacttgatgctgcgtcctgatgagatcgataagtttgcgcacggatttgtcgcgcgtcaattggttgagacacgtcagatcattaaattaaccgaacagattgccgcggcgcaatatcccaacaccaagatcatcgcggtcaaagctggcttatcacatcaactgcgcgaagaactagactttccaaagaatcgtgatgtgaaccactaccaccacgcatttgatgccttcttagcagcgcggatcggcacgtatctgcttaagcggtatccgaaattggcgccatttttcacgtatggcgaatttgcaaaggtcgatgttaagaagttccgcgaattcaacttcattggtgcactaacacatgctaagaagaatattgtcgctaaagataccggcgagattgtttgggataaagaacgtgatatccaagagttggatcggatatataacttcaagaggatgttgataacgcacgaggtttactttgaaacagctgatttgttcaagcagacaatttatgctgccaaggattcgaaagaacgtggcggaagtaagcagctgattcctaagaagcagggttatccgactcaggtttatgggggttatacacgggaaaatacggcttatttggcggtggttaaaactgttgaaaagaaagcagatgtctatagagttgtcagaattgcaacttctcaagtagcggcattgaaagaagctagagcgcaatcgactgtcaaagaacgagaattattaaagaagtttttgacaacaaaattcacaaaaatcgggaagaacggtaaaaaagcaataacgccatttgatatcgttattccacgagtaccacgcgaacaactctttcataataaacgttatggctttttcatggttaattccgatacgctgatgcataactatcaggaactgtggatgtcacgctccgatcagcaaattttgtcaaaacttgtaaagtctgcgaaaactgtggaaaatggccaagtcggcaggctgtttgaaaatatagtggaacagattaataagtattttcctctgtatgatattaatcaattccgaaaaaagcttgatcaaagcaaagatatattttcaaaattaccattggaaggaaatggtacaacctcagggaagagagaaaccattcagaatattctaactggagcaggaactggtgcaaagaatggtgacttgaagaacttgggcataaaaacaccttttggttttttgcaagttccaagtggtattgtgctggatgacgacaccacattgatttatcaatctccaacaggaatgcttaacagaattgttcgattaagcgaactataa

SEQ ID NO: 69 - DNA, 4035 bp, Mycoplasma gallisepticum
  source 1..4035: mol_type = unassigned DNA
atgaaaaaaccttactctattggacttgatattggaaccaattctgttggttgggctgttgtgacagatgactacaaagttcctgctaagaagatgaaggttctgggaaatacagataaaagtcatatcaagaaaaatttgcttggcgctttattatttgatagcgggaatactgcagaagacagacggttaaagagaactgctcgccgtcgttacacacgtcgcagaaatcgtattttatatttgcaagagattttttcagaagaaatgggcaaggtagatgatagtttctttcatcgtttagatgagtcatttttgacagatgatgataaaaattttgattcacacccaatcttcggcaataaagcagaagaagatgcctatcatcagaaatttcctacaatttaccatttaagaaaacatcttgcagattcaactgaaaaagctgatttacgcttggtttatctagctttggcacatatgattaaattccgtggacatttcttaattgagggtgaattgaacgccgaaaatacagatgttcaaaaattattcgctgatttcgtaggagtgtatgatagaacatttgacgatagtcatttatcagaaattacggttgatgcttcgagtattttgacagaaaaaattagcaaatcacgccgtttagaaaaacttataaataactatccaaaggaaaagaagaatactttatttggaaatctcattgctttgtctttaggattacagcctaattttaaaacgaattttaaattatctgaagatgctaagttgcaattttctaaagatacttatgaagaagagttagaagtactattagctcaaattggagataattacgcagagctctttttatcagcaaagaaactgtatgatagtatccttttatcagggattttaacagttactgatgttagtaccaaagcgcctttatctgcttcgatgattcagcgatataatgaacatcagatggatttagctcagcttaaacaattcattcgtcagaaattatcagataaatataacgaagttttttctgatgtttcaaaagacggctatgcgggttatattgatgggaaaacaaatcaagaagctttttataaataccttaaaggtctattaaataagattgagggaagtggctatttccttgataaaattgagcgtgaagattttctaagaaagcaacgtacctttgacaatggctctattccacatcagattcatcttcaagaaatgcgtgctatcattcgtagacaggctgaattttatccgtttttagcagacaatcaagataggattgagaaaatattgactttccgtattccctactatgttggtccattagcgcgcggaaaaagtgattttgcttggttaagtcggaaatcggctgataaaattacaccatggaattttgatgaaatcgttgataaagaatcctctgtagaagcttttatcaatcgtatgacaaattatgatttgtacttaccaaatcaaaaagttcttcctaaacatagtttattatacgaaaaatttactgtttacaatgaattaacaaaggttaaatataaaacagagcaaggaaaaacagcattttttgatgccaatatgaagcaagaaatctttgatggcgtatttaaggtttatcgaaaagtaactaaagataaattaatggatttccttgaaaaagaatttgatgaatttcgtattgttgatttaacaggtctggataaagaaaataaagcatttaacgcttcttatggaacttatcatgatttgcgtaaaattttagataaagattttctcgataattcaaagaatgaaaagattttagaagatattgtgttgaccttaacgttatttgaagatagagaaatgattagaaaacgtctaaaaaattacagtgatttattgaccaaagaacaactgaaaaagctggaaagacgtcattatactggttggggaagattatcagctgagttaattcatggtattcgcaacaaagaaagcagaaaaacaattcttgattatctcattgatgatggcaatagcaatcgtaactttatgcaactgattaacgatgatgctctttctttcaaagaagagattgctaaggcacaagttattggagaaacagacaatctaaatcaagttgttagtgatattgctggcagccctgctattaaaaaaggaattttacaaagcttgaagattgttgatgagcttgtcaaaattatgggacatcaacctgaaaatatcgtcgtggagatggcgcgtgaaaaccagtttaccaatcagggacggcgaaattcacagcaacgtttgaaaggtttgacagattctattaaagaatttggaagtcaaattcttaaagaacatccggttgagaattcacagttacaaaatgatagattgtttctatattatttacaaaacggcagagatatgtatactggagaagaattggatattgattatctaagccagtatgatatagaccatattatcccgcaagcttttataaaggataattctattgataatagagtattgactagctcaaaggaaaatcgtggaaaatcggatgatgtaccaagtaaagatgttgttcgtaaaatgaaatcctattggagtaagctactttcggcaaagcttattacacaacgtaaatttgataatttgacaaaaggtgaacgaggtggattgaccgacgatgataaagctggattcatcaagcgtcaattagtagaaacacgacaaattaccaaacatgtagcacgtattctggacgaacgatttaatacagaaacagatgaaaacaacaagaaaattcgtcaagtaaaaattgtgaccttgaaatcaaatcttgtttccaatttccgtaaagagtttgaactctacaaagtgcgtgaaattaatgactatcatcatgcacatgatgcctatctcaatgctgtaattggaaaggctttactaggtgtttacccacaattggaacctgaatttgtttatggggattatcctcattttcatggacataaagaaaataaagcaactgctaagaaatttttctattcaaatattatgaacttctttaaaaaagatgatgtccgtactgacaaaaatggtgaaattatctggaaaaaagatgagtatatttctaatattaaaaaagtgctttcttatccacaagttaatattgttaagaaagtagaggagcaaacgggaggattttctaaagaatctatcttgccgaaaggtgattctgacaagcttattcctcgaaaaacgaagaaattttattgggataccaagaaatatggaggatttgatagcccgattgttgcttattctattttagttattgctgatattgaaaaaggtaaatctaaaaaattgaaaacagtcaaagccttagttggtgtcactattatggaaaagatgacttttgaaagggatccggttgcttttcttgagcgaaaaggctatcgaaatgttcaagaagaaaatattataaagttaccaaaatatagtttatttaaactagaaaacggacgaaaaaggctattggcaagtgctagggaacttcaaaagggaaatgaaatcgttttgccaaatcatttaggaaccttgctttatcacgctaaaaatattcataaagttgatgaaccaaagcatttggactatgttgataaacataaagatgaatttaaggagttgctagatgttgtgtcaaacttttctaaaaaatatactttagcagaaggaaatttagaaaaaatcaaagaattatatgcacaaaataatggtgaagatcttaaagaattagcaagttcatttatcaacttattaacatttactgctataggagcaccggctacttttaaattctttgataaaaatattgatcgaaaacgatatacttcaactactgaaattctcaacgctaccctcatccaccaatccatcaccggtctttacgaaacgcggattgatctcagtaagttaggaggagac

SEQ ID NO: 70 - DNA, 4134 bp, Streptococcus agalactiae
  source 1..4134: mol_type = unassigned DNA
atgaataagccatattcaataggccttgacatcggtactaattccgtcggatggagcattattacagatgattataaagtacctgctaagaagatgagagttttagggaacactgataaagaatatattaagaagaatctcataggtgctctgctttttgatggcgggaatactgctgcagatagacgcttgaagcgaactgctcgtcgtcgttatacacgtcgtagaaatcgtattctatatttacaagaaatttttgcagaggaaatgagtaaagttgatgatagtttctttcatcgattagaggattcttttctagttgaggaagataagagaggtagcaagtatcctatctttgcaacaatgcaggaggagaaatattatcatgaaaaatttccgacaatctatcatttgagaaaagaattggctgacaagaaagaaaaagcagaccttcgtcttgtttatctggctctagctcatatcattaaattcagagggcatttcctaattgaggatgatagatttgatgtgaggaataccgatattcaaaaacaatatcaagcctttttagaaatttttgatactacctttgaaaataatcatttgttatctcaaaatgtagatgtagaagcaattctaacagataagattagcaagtctgcgaagaaggatcgcatcttagcgcagtatcctaaccaaaaatctactggtatttttgcagaatttttgaaattgattgtcggaaatcaagctgacttcaagaaacatttcaatttggaggataaaacaccgcttcaattcgctaaggatagctacgatgaagatttagaaaatcttcttggacagattggtgatgaatttgcagacttattctcagtagcgaaaaagctatatgatagtgttcttttatctggcattcttacagtaactgatctcagtaccaaggcgccactttctgcctctatgattcagcgttatgatgaacatcatgaggacttaaagcatctaaaacaattcgtaaaagcttcattacctgaaaattatcgggaagtatttgctgattcatcaaaagatggctacgctggctatattgaaggcaaaactaatcaagaagctttttataaatatctgttaaaattgttgaccaaacaagaaggtagcgagtattttcttgagaaaattaagaatgaagattttttgagaaaacagagaacctttgataatggctcaatcccgcatcaagtccatttgacagaattgagggctattattcgacgtcaatcagaatactatccattcttgaaagagaatcaagataggattgaaaaaatccttacctttagaattccttattatgtcgggccactagcacgtgagaagagtgattttgcatggatgactcgcaaaacagatgacagtattcgaccttggaattttgaagacttggttgataaagaaaaatctgcggaagcttttatccatcgcatgaccaacaatgacctctatcttccagaagaaaaagttttaccaaagcatagtcttatttatgaaaaatttactgtttacaatgaattaacgaaggttagatttttggcagaaggctttaaagattttcaatttttaaataggaagcaaaaagaaactatctttaacagcttgtttaaggaaaaacgtaaagtaactgaaaaggatattattagttttttgaataaagttgatggatatgaaggaattgcaatcaaaggaattgagaaacagtttaacgctagcctttcaacctatcatgatcttaaaaaaatacttggcaaggatttccttgataatacagataacgagcttattttggaagatatcgtccaaactctaaccttatttgaagatagagaaatgattaagaagtgtcttgacatctataaagatttttttacagagtcacagcttaaaaagctctatcgccgtcactatactggctggggacgattgtctgctaagctaataaatggcatccgaaataaagagaatcaaaaaacaatcttggactatcttattgatgatggaagtgcaaaccgaaacttcatgcagttgataaatgatgatgatctatcatttaaaccaattattgacaaggcacgaactggtagtcattcggataatctgaaagaagttgtaggtgaacttgctggtagccctgctattaaaaaagggattctacaaagtttgaaaatagttgatgagctggttaaagtcatgggctatgaacctgaacaaatcgtggttgaaatggcacgtgagaaccaaacgacagcaaaaggattaagtcgttcacgacaacgcttgacaaccttgagagaatctcttgctaatttgaagagtaatattttggaagagaaaaagcctaagtatgtgaaagatcaagttgaaaatcatcatttatctgatgaccgtcttttcctttactacttacaaaacggaagagatatgtatacaaaaaaggctctggatattgataatttaagtcaatatgatattgaccacattattcctcaagctttcataaaagatgattctattgataatcgtgttttggtatcatctgctaaaaatcgtggaaaatcagatgatgttcctagcattgaaattgtaaaagctcgcaaaatgttctggaaaaatttactggatgctaagttaatgagtcagcgtaagtatgataatttgactaaggcagagcgcggaggcctaacttccgatgataaggcaagatttatccaacgtcagttggttgagactcgacaaattaccaagcatgtagctcgtatcttggatgaacgcttcaataatgaagttgataatggtaaaaagatttgcaaggttaaaattgtaaccttgaagtcaaatttggtttcaaatttccgaaaagaatttggattctataaaattcgtgaagttaatgattatcaccatgcacacgatgcttatcttaatgcagtagttgccaaagctattctaaccaaatatccacagttagagccagagtttgtctacggaatgtatagacagaaaaaactttcgaaaatcgttcatgaggataaggaagaaaaatatagtgaagcaaccaggaaaatgtttttctactccaacttgatgaatatgttcaaaagagttgtgaggttagcagatggttctattgttgtaagaccagtaatagaaactggtagatatatgagaaaaactgcatgggataaaaagaaacactttgcgacagttagaaaagtcttgtcataccctcagaacaatatcgtgaagaagacagagattcagacaggtggtttctctaaggaatcaatcttggcgcatggtaactcagataagttgattccaagaaaaacgaaggatatttatttagatcctaagaaatatggaggttttgatagtccgatagtagcttactctgttttagttgtagctgatatcaaaaaaggtaaagcacaaaaactaaaaacagttacggaacttttaggaattaccatcatggagaggtccagatttgagaaaaatccatcagctttccttgaatcaaaaggttatttaaatattagggacgataaattaatgattttaccgaagtatagtctgttcgaattagaaaatgggcgtcgtcgattacttgctagtgctggtgaattacaaaaaggtaacgagctagccttaccaacacaatttatgaagttcttataccttgcaagtcgttataatgagtcaaaaggtaaaccagaggagattgagaagaaacaagaatttgtaaatcaacatgtctcttattttgatgacatccttcaattaattaatgatttttcaaaacgagttattctagcagatgctaatttagagaaaatcaataagctttaccaggataataaggaaaatataccagtagatgaacttgctaataatattatcaatctatttacttttaccagtctaggagctccagcagcttttaaattttttgataaaatagttgatagaaaacgctatacatcaactaaagaagtacttaattctactctaatccatcaatctattactggactttatgaaacacgtattgatttgggtaaattaggagaagattga

SEQ ID NO: 71 - DNA, 4116 bp, Streptococcus dysgalactiae
  source 1..4116: mol_type = unassigned DNA
atggataagaaatactcaataggcttagatatcggcacaaatagcgtcggatgggcggtgatcactgatgattataaggttccgtctaaaaagttcaaggttctgggaaatacagaccgccacagtatcaaaaaaaatcttataggggctcttttatttgacagtggagagacagcggaagcgactcgtctcaaacggacagctcgtagaagatatacgcgccgaaagaatcgtattcgttatttgcaggaaatctttagcagtgagatgtccaaagtagatgatagtttctttcatcgacttgaagagtcttttttggtggaagaagacaagaagcatgaacgtcatcctatttttggaaatatagtagatgaagttgcttatcatgagaaatatccaactatctatcatctgcgaaaaaaattggcagattctactgataaagcggatttgcgcttaatctatttggccttagcgcatatgattaagtttcgtggtcattttttgattgagggagatttaaatcctgataatagtgatatggacaaactatttatccagttggtacaaacctacaatcaattatttgaagaaaaccctattaacgcaagtagagtagatgctaaagcgattctttctgcacgattgagtaaatcaagacgattagaaaatctcattgctcagctccccggtgagaagagaaatggcttgtttgggaatctcattgctttgtcattgggattgacccctaattttaaatcaaattttgatttggcagaagatgctaaattacagctttcaaaagatacttacgatgatgatttagataatttattggcgcaaattggagatcaatatgctgatttgtttttggcagctaagaatttatcagatgctattttactttcagatatcctaagagtaaatagtgaaataactaaggctcccctatcagcttcaatgattaaacgctacgatgaacatcatcaagacttgactcttttaaaagctttagttcgacaacaacttccagaaaagtataaagaaatcttttttgatcaatcaaaaaacggatatgcaggttatattgatgggggagctagccaagaagaattttataaatttatcaaaccaattttagaaaaaatggatggtactgaggaattattggcgaaactaaatcgtgaagatttgctgcgcaagcaacggacctttgacaacggctctattccccatcaaattcacttgggtgagctgcatgctattctgagaagacaagaagacttttatccatttttaaaagacaatcgtgagaagattgaaaaaatcttgacctttcgaattccatattatgttggcccattggcgcgtggaaatagtcgctttgcatggatgactcggaagtctgaagaaacgattactccatggaattttgaagaagttgtcgataaaggtgcttcagctcaatcatttattgaacgcatgacaaactttgataaaaatcttccaaatgaaaaagtactaccaaaacatagtttgctttatgagtattttacggtttataacgaattgacaaaggtcaaatatgttactgagggaatgcgaaaaccagaatttctttcaggaaagcagaaagaagccattgttgatttactcttcaaaacaaatcgaaaagtaaccgttaagcaattaaaagaagattatttcaaaaaaatagaatgttttgatagcgttgaaatttcaggcgttgaagatcggtttaatgcgtcattaggtacctaccatgatttgctaaaaattatcaaagataaagattttttggataatgaagaaaatgaagatattttagaggatattgttttaacattgaccttatttgaagataaggaaatgattgaggaacgacttaaaaagtatgctaacctctttgatgataaggtgatgaaacagcttaaacgtcgccattatactggctgggggcgtttgtctcgaaaattgattaatggaattagggataagcaatctggtaaaacaatattagattttttgaaatcagatggttttgccaatcgcaactttatgcagcttatcaatgatgatagtttaacattcaaggaagctattcaaaaagcacaggtgtctggacaaggccatagtttacatgaacagatagctaacttagctggcagtcctgctattaaaaaaggtattttacagtctgtaaaagttgttgatgaactggtcaaagtaatggggcataagccagaaaatatcgttattgaaatggcacgtgaaaatcagacaactcaaaagggccagaaaaattcgcgagagcgtatgaaacgaatcgaagaaggtatcaaagaattaggaagtcagattcttaaagagcatcctgttgaaaatactcaattgcaaaatgaaaagctctatctctattatctacaaaatggaagagacatgtatgtggaccaagaattagatattaatcgtttaagtgattatgatgtcgatcacattgttccacaaagtttcattaaagacgattcaatagacaataaggtcttaacgcgttctgataaaaatcgtggtaaatcggataacgttccaagtgaagaagtagtcaaaaagatgaaaaactattggagacaacttctaaacgccaagttaatcactcaacgtaagtttgataatttaacgaaagctgaacgtggaggtttgagtgaacttgataaagctggttttatcaaacgccaattggttgaaactcgccaaatcactaagcatgtggcacaaattttggatagtcgcatgaatactaaatacgatgaaaatgataaacttattcgagaggttaaagtgattaccttaaaatctaaattagtttctgacttccgaaaagatttccaattctataaagtacgtgagattaacaattaccatcatgcccatgatgcgtatctgaatgccgtcgttggaactgctttgattaagaaatatccaaaactagaatcggagtttgtctatggtgattataaagtttatgatgttcgtaaaatgattgctaagtctgagcaggaaataggcaaagcaaccgcaaaacgtttcttttattctaatatcatgaactttttcaaaacagaaattacacttgcaaatggagagattcgcaaacgccctctaatcgaaactaatgaggaaaccggagaaattgtctgggataaagggcgagattttgccacagtgcgcaaagtattgtccatgccacaagtcaatattgtcaagaaaacagaagtacagacaggtgcactgactaatgaatcaatttatgctagaggaagttttgataaattaatcagtcgtaaacatcgttttgagtcctctaaatatggaggatttggcagcccgactgttacttatagtgtgttagtagttgcgaaatccaaagttcaagatggaaaagtaaaaaaaataaaaactggaaaagaattaattgggattacattattagataaactagtttttgaaaaaaatccattaaaatttattgaagataagggatacggaaatgttcaaattgataagtgcattaagttacctaaatatagcctctttgaatttgaaaatggcactcgaagaatgcttgctagtgttatggcgaataataatagcaggggagatttgcaaaaagcaaatgaaatgtttttaccggcgaagttggtaacactgctataccatgcacacaaaattgagagttctaaagaattggagcatgaagcatacattttggaccactataatgatttgtatcaattgctgagctatatagaacgatttgcttcattatacgtggatgttgaaaagaacatttctaaagtaaaagaacttttcagcaacattgaaagctattctatttctgaaatttgttcctccgttattaatttattaacacttacagcatccggtgctcctgcagattttaaattcttaggcacaacaattccacgaaaacgttatggttctccccagtctattctcagttctacccttatccatcaatccatcactggtctttatgaaacacgcattgatttgagtcagttaggaggtgactaa

SEQ ID NO: 72 - DNA, 4116 bp, Streptococcus gallolyticus
  source 1..4116: mol_type = unassigned DNA
atgactgagaaaaattattcaatcggacttgatattggtacgaacagtgttggttgggctgtgattactgatgattacaaggttccagctaaaaaaatgaaagttttaggaaatactgataaaaagtatattaagaaaaatttattgggagccttattgtttgataatggcgaaacagcagaagctactcgcttaaagcgtactgctagacgacgttacacacgccgcaaaaatcgtttacgttacctacaagaaatttttgcggaagaaatggctaaagttgatgaaagcttcttttatcgtcttgatgaatcatttttgacaacagatgataaagatttcgaacgtcatccaatttttggaaataaagcagatgaaataaaatatcatcaagaatttccaaccatctatcacttgcgaaaacatcttgctgactctcatgaaaaagcagatttacgtttaatctatcttgctttagcacacatgattaaattccgtgggcattttttaattgaaggtgaattgaatgctgaaaatacagatgttcaaaaattattcgaagcttttgttgaagtgtatgatagaacctttgatgacagtaacttatcagaaattacggttgatgcttcaagtattctaacagaaaaatttagcaaatcacgtcgtttagagaatcttattaaacactatccgacagaaaagaagaataccttatttggaaatcttgttgctttagctctaggattacaaccaaactttaaaacaagttttaaactatctgaagatgctaaattgcaattttctaaagatacttatgaagaagatttagaagagttgattggaaaaattggtgatgagtatgcggacttatttacatcagctaaaaatctttatgatgctattttgttgtcaggaattttaacagtagctgataataccacaaaagctccactatcagcttcaatgattaagcgttacaatgaacatcaagtagatttaaaaaaattaaaagaatttatcaaaaataatgcttctgataagtatgatgaaattttcaatgataaagataagaatggttatgctggttacattgaaaatggagtcaaacaagacgaattctataaatatttaaaaacaacactttctaaaattgatggaagtgattatttccttgacaaaattgaacgtgaagattttttaagaaaacaaagaacatttgataatggttcaattccgcatcaaattcatttacaagaaatgcatgctattttacgtcgtcaaggtgagcattatgcattcttgaaagaaaaccaagctaagattgaaaaaatcttaacctttagaattccttactatgttggtccattggcacgaaaaaatagtcgatttgcatgggcagagtatcattctgacgagaagattacaccgtggaattttgatgagattatagacaaagaaaagtcagccgaaaaattcattacacgcatgactttaaatgatttgtatttacctgaagaaaaggttctaccaaaacatagtcttgtttatgaaacttatactgtttataatgaattgacaaaagttaagtacgttaatgaacaaggcaaatcaaacttttttgatgcaaatatgaagcaggaaatttttgaacatgtctttaaagaaaatcgtaaagtcactaaagataaatttctaaactatcttaataaagaatttcctgagtatcgtattcaagatttaatcgggcttgataaagaaaataaatcattcaatgctagtcttggaacttaccatgatttgaaaaagattttggacaagtcattcttagacgataaaactaatgaaacgataattgaagatattatccaaacattgactttatttgaagatagagatatgattcgtcagcgtcttcaaaaatatagcgatatctttacaccacaacaattgaaaaaattggaacgccgtcattatacaggatggggacgtttatcatataaattgattaatggtattcgaaataaagaaaatgggaaatcgattcttgattatttaattgatgatggttatgctaaccgtaattttatgcaattaattagcgatgatacgttgccatttaaacaaattattaaagacgcacaaattattggtgacattgatgatgttacaagtgtagtacgcgaattacctggaagtcctgctatcaaaaaaggtatcctacaaagtgtcaaaatcgttgatgagctagttaaagtgatgggacataatcctgataatattgtcattgagatggcgcgtgaaaatcaaacaactaatagaggaagaaatcaatctcaacaacgtttgaaaaaacttcaggactcattaaaagaattaggaagtaatatccttaatgaggaaaaaccatcgtatattgaaggtaaagttgaaaacaaccacctccaagatgatcgtctattcctttattacattcaaaatggtaaggatatgtacactggtgatgagttagatattgaccatctaagtgattatgatattgaccacatcattcctcaagcctttattaaggatgactcaattgataatcgagtattgacaagttctgctaagaatcgaggtaaatcagatgatgtaccaagtcttgatattgttcatgatagaaaggcagattggattagattatacaaatctgggttaatttctaagcgtaaatttgataatttgactaaagcagaacgtggtggtttgactgaaaatgataaagcaggatttattaagcgtcaattggttgaaacacgtcaaattacaaaacatgtagcgcaaattttagatagtcgttttaatactgaacgtgatgaaaatgataaagtaattcgtaatgttaaagttattactttgaaatcaaatctagtttcacaattccgaaaagattttaaattttataaggttcgagaaattaatgattatcatcatgctcatgatgcgtatctcaatgcagttgttggaacagcgttattgaaaaaatatcctaaattagctcctgaatttgtttatggtgagtacaagaaatatgatattcgtaaatttatcactagttcaggtgataaagcaacagcaaaatatttcttctattcaaatttgatgaatttctttaaacgtgttataagatattcaaatggtaaggtagtagttcgaccggttattgagtgtagcaaggatactggtgaaattgcttggaacaagcaaactgactttgaaaaagttcgaagggttctttcttatccgcaagttaatattgttaaaaaagttgaaactcaaacgggtggattttcaaaagaatctattctacctaagggaaattctgataaactaattccacgaaaaacaaagaaattccgctgggatactccaaaatatggaggatttgatagcccaaacattgcttactctgtttttgttatagctgatgttgaaaaaggcaaggctaaaaaattgaaaactgtaaaagaattggtgggaatatcaattatggagcgctcttcctttgaagaaaatccagttgtatttttagaaaagaaagggtatcaaaatgttcaagaggataacttgataaaacttcctaaatatagtctttttgaatttgaaggcggaagaagacgtttattagccagtgcttcagaacttcaaaagggaaatgaagtagtactttcacgtcatttagtagaattactttatcatgctcatcgagttaatagttttaataactctgaacatttgaaatacgttagtgagcataagaaagaatttggagaagtcttatcttgtgtagaaaattttgctaagtcatacgttgacgttgaaaaaaatcttggcaaaattagagcagttgctgataagatagatacattctcaattgaagatatttcaatatcatttgtcaatttattaacattgactgcactaggagcaccagcagattttaacttcttaggtgaaaaaattccacgtaaacgttatacttcaaccaaagaatgtctaaatgccacccttatccaccaatctatcactggtctttatgaaacacgtattgatttgagtaaattaggagaagagtaa

SEQ ID NO: 73 - DNA, 3411 bp, Streptococcus gordonii
  source 1..3411: mol_type = unassigned DNA
atgaacggtttagttttaggtttagatattggtattgcctctgtaggggtggggattctagaaaaagatacggggaagatcattcatgctagttctcggctttttccagctgcaactgccgacaataatgtcgaaagaaggagtaatagacagggaagacgattaaatcgcaggaaaaaacaccgtagtgttaggcttcaggatctatttgaaggctatggtttgttaactgatttttctaaagtgtcaatgaatttaaatccttatcaacttcgtgtacaaggaatggagaatcaactcacaaacgaagagttgtttgttgcattgaagaatattgttaaaaggcgtggtattagctatttagatgatgcttctgaggatgggggtacagtatcgtctgattatggtaaggcagttgaagaaaatagaaaattacttgctgaaaagacacctggtcaaatccaactagagcgttttgaaaaatatggtcaattaaggggagattttactgttgaagaaaatggtgaaaaacatcgattgatcaatgtcttttcaacatctgcttatagaaaagaagctgaaagaattcttagaaaacagcaagaatttaatagtaaaattactgatgagtttatagaggattatttaataatccttacagggaaaagaaaatattatcatggaccaggtaatgaaaaatctcggacagattatggacgttttcgaacagatggtactaccttagataatatttttggtattttaattggcaaatgtacattttatactgaggaatatagagcttcaaaagcctcctatactgctcaagagtttaatttactaaatgatttaaataatttaacagttcctacagagaccaagaaacttagtgaggaacaaaagaagctaatcattgaatatgcaaagtcggcgaaaacattaggagcttcaactttattgaagtacattgctaaaatgattgatgcttcagtagatcagatacgtggttaccgagttgatgtaaataataaacctgaaatgcatacttttgaagtctatcggaaaatgcaatctttagaaacgataaaagttgaagaattgcctagaaaagttctagatgagcttgctcatattctaactttgaatacagagcgagaaggtatagaagaagcgattaactcgaagttaaaggatatatttaatcgagatcaagtacttgaattggttcaatttagaaaaaataatagcagtctatttagtaaaggatggcataatttttctattaaactcatgatggagttgataccagaactttatgaaacttcagaagagcaaatgacaattctcacacgattgggaaaacaaagatctaaagagacatcaaaacgaactaagtatattgatgaaaaagaattaacagaagaaatctataatcctgtagtagcaaaatctgttagacaggccataaagataatcaacgaagcaactaaaaaatatggtatctttgataatatcgttatcgaaatggcccgtgaaaataacgaagaagatgctaagaaagattatataaaacgtcaaaaagcaaaccaagatgagaagaatgcggctatggaaaaagcagcgtttcaatacaatggtaaaaaagagttaccagataacatttttcatggccataaggaattgactactaagattcgtttatggcatcaacagggagaaaagtgtctctatactgggaagaatattccaatttcagatttaatccacaatcagtacaagtacgaaatcgatcatattttacctttatctctatcttttgatgatagtttatctaataaagtattagttctagctactgcaaaccaagaaaagggacaacgaacaccgtttcaggctttagatagtatggatgatgcatggtcctaccgtgagtttaaatcatatgtaaaagattcaaaattattaagtaataaaaagaaagattatcttttaacagaagaagacattagtaaaattgaggtgaagcagaagtttattgaacgaaatctagttgatactagatattcttctcgagttgttttaaatgccttgcaagatttttataagagccatcaattggatacaactatttcggtggtacgtggacaatttacctctcagctaaggagaaagtgggggattgaaaaatctcgtgagacctaccaccatcatgctgtggatgcattaattattgctgcttccagtcaattaagattatggaaaaaacatagtaatcctctgattgcttataaagaagggcaattcgttgattcagagactggagaaatcgtttcattaagtgatgaagaatacaaagagttagtatttaaagcaccttatgatcattttgttgacacattacgtagtaagaagtttgaggatagcattttgttttcatatcaagtggattcaaaatataaccgtaaaatttcagatgcgaccatttatgcaacaagaaaagcaaaattggataaagagaaaaaagaatatacttatactttggggaaaataaaagatatctatgctttagggacaaaaactccgtctaaaacaggattttataagtttttagatttatacaagacggataaatctcaattcttaatgtatcagaaggataggaaaacttgggatgaagtaatagagaagataattgaacaatatcgaccatttaaagaatatgacaaaaatggaaaagaggttgatttcaatccttttgaaaaatatagaattggaaatggtcctattcggaaatatagtaaaaaagggaatggtccagaaattaaaagtctgaaatactacgatatattattaggtaaacacaaaaatataactcctgatgggagtcgaaatactgtagctttgttatctttaaatccttggagaacagatgtttactacaattcggaaactaaaaaatatgaatttttgggattaaagtatgcagatttgtgtttcgaagaggggggagcctatggtatttctgaagttaagtataaaaagataagagagaaagaaggaattggtaagaattctgaatttaagtttaccctgtataagaatgatttaattttaattaaagatactgaaacgaattgtcaacaattctttagattttggtctcgtactgggaaagataatccaaaaagttttgaaaaacataaaatagaattgaaaccttatgaaaaagcaaaatttgagaaaggagaagaacttaaagtattaggaaaggtaccaccttcctctaatcaattccaaaaaaatatgcaaatagaaaatctttctatttacaaagtcaaaacagatattttaggaaataaacatttcatcaaaaaagagggtgatgaaccaaaactcaaatttaaaaaataa

SEQ ID NO: 74 - DNA, 4035 bp, Streptococcus mutans; identical to SEQ ID NO: 69
  source 1..4035: mol_type = unassigned DNA

SEQ ID NO: 75 - DNA, 3384 bp, Streptococcus salivarius
  source 1..3384: mol_type = unassigned DNA; mol_type = unassigned DNA
atgagcgacttagttttaggacttgatatcggtataggttctgttggtgtaggtatccttaataaagtgacgggagaaattatccataagaactcacgcattttcccagcagctcaagcggagaataatgtagaacgtagaataaatcgtcaaggaagacgattgacacgacgtaaaaaacatcgtagagttcgtttaaatcatttatttgaagaaagtggcttaatcactgattttacaaatgtttcaatcaatcttaacccatatcaattgcgagttaagggtttgaccgatgaattgtctaatgaagaattgtttatcgctcttaaaaatatggtgaaacaccgtgggattagttaccttgatgatgccagtgatgacgggaattcatcagtaggcgactatgcacaaattgtcaaagaaaacagtaaacaattagagacaaaaacaccaggccagattcaattggaacgctaccaaaaatatggtcaattacgtggtgatttcacagtcgaagaagatggaaaaaaacatcgcttaattaatgtctttcccacatcagcttatcgagcagaagcactgagaatactgcaaactcaacaagaatttaatccacagattaccgatgaatttattaatagttatctccaaattctaactggaaaacgtaaatattatcacggaccaggaaatgagaagtcacggactgattatggaaggtatactactaagaaagattctgaagatgagtacataactttagacaatatttttggaatcctaattgggaaatgtacattttatccggaagagtatagagcagcaaaagcatcctatacggctcaagaattcaatttgctaaatgatttgaacaatctaaccgttccaacagaaaccaagaagttgagcgaagaacagaagaatcaaatcattaccaatgtcaaaaatgaaaaggcgatgggtccagcgaaactctttaaatatatcgctaagctactttcttgcgatgttgcggatatcaaaggataccgtatcgataaatcagataaggctgaaattcatactttcgaagcctatcgaaaaatgaagacgcttgcaaccattgatattgagcaaatggagagagaaaatcttgataagttagcctatgtcttaacattaaatacggagaaggaaggtatccaagaagcgttagagcatgagtttgctgatgggaccttcagtcaggagcaaattgatgaattggttcaatttcgcaaagcaaatagttctatttttggaaaaggttggcacagtttttctgtcaaacttatgatggaattaatcccagaattatatgcgacgtcagaagaacaaatgactattctgacacgactaggaaaacaaaaaacaacttcgtcttcaaataaaaccaaatatattgatgagaaacaactaactgaagaaatctacaatcctgttgctgctaagtctgttcgccaagctataaaaatcgtaaatgcggcaatcaaagagtatggtgattttgacaatattgtcatcgaaatggctcgagaaacgaatgaagatgatgaaaagaaagctattcaaaagattcaaaaagctaataaagatgaaaaggatgcagccatgcttaaggctgccaaccaatataatggaaaggctgaattaccacatagtgttttccatggtcataagcaattagcaaccaaaatccgtctctggcatcagcaaggagaacgttgcctttatactggtaaaacaatttcgattcatgatttgatcaataattctaatcagtttgaaatagatcatattttacctctttcgatcaccttcgatgacagccttgccaataaggttttggtttatgcaactgctaaccaagaaaaaggacaacgaacaccttatcaggctttagatagcatggatgatgcatggtctttccgtgaattaaaagcttttgtacgtgactcaaaagcactttcaaacaagaaaaaagaataccttcttacagaagaggatatttcaaaatttgatgttcgaaagaaatttatcgaacgaaatcttgtagatacaagatacgcttcaagagttgtcctcaatgcccttcaagaacactttagagttcacaagactgatacaaaagtttccgtggttcgtggtcaattcacatctcaattgagacgccattggggaatcgagaagactcgtgatacttatcatcaccatgctgtagatgcactgatcattgctgcttcaagtcagttgaatttgtggaaaaaacaaaagaatactcttgtaagttattcagaagatcaactacttgatattgaaacaggtgaacttattagtgacgatgaatacaaggaatctgtattcaaagctccttatcaacattttgttgatacattgaagagtaaagagtttgaagacagtatattgttctcatatcaagtggattctaagtttaatcgtaaaatatcagatgccactatttacgcaacaaggcaggctaaagtaggaaaagataagaaagacgaaacttatgtcttagggaaaattaaagatatctatagccagactggctatgatgcttttataaagatttataagaaagataagtcaaaattccttatgtatcgacacgatccacaaacctttgagaaagttatcgaaccaattttagagaactatcctaacaaggagctgaatgaaaaagggaaagaagtaccttgtaatcctttcctaaaatataaagaagaccatggctatattcgtaaatatagtaaaaaaggcaatggtcctgaaatcaagagtcttaaatactatgatagtaagttaggtaatcatattgatatcactccaaagaatagtaacaataaggttgtcttgcagtcagtttctccatggagagcggatgtctatttcaataagactactggaaaatacgaaatccttggattgaaatatgctgatctaaaatttgagaaagggacaggaacatataagatttccgaagaaaaatacaatgacattaagataaaagagggtgtagattctgattcagaatttaagttcacactatataaaaatgatttgttgcttatcaaagatacggaaacaaaagaacaacagctttttcgttttctttctcgaaccatgcctaatgtgaaacattatgtagaattaaaaccttatgataaacagaaatttgatgataatgaagagcttatcaaaattttaggaattgttgctaaaggaggacaatgtaaaaaaggggtaagtaaacccaatatttccatttacaaaataagaacggatgtcctagggaatcagcatatcatcaaaaatgagggtgataagcctaagctagatttttaa

SEQ ID NO: 76 - DNA, 3369 bp, Streptococcus suis
  source 1..3369: mol_type = unassigned DNA
atgtcaaacggtaaaattttaggccttgatattggtattgcttccgtcggagtaggcgtcatagatgcacaaacgggagaaatcattcatgcaagctctcgtatttttccctctgcaaatgctgctaataatgcagaacgccgaacttttcgtggaagtcgtcgattgattaggagaaaaaaacatagaattaaaagattagatgatttatttaatgattttcatattaatttagatggagaaatgtcgacagataatccatatgttcttcgcgtgaaaggcctctctcaaaaactaacagttgaagaattatatatttctataaagaatattatgaagcgcagggggatatcctatctagatgatgcagagtcagataacgaggcgggaagaagtgattatgctaaagctatcgagcgtaatagacagttattgactagtaaaacaccaggggaaattcagttagagcgcttagagaaatacggtcagttgcgtggaaatttcacgataattgatgaggaggggcaatctcaacaaattatcaatgttttttcaacatcagattatgtcaaggaagttgagaaaattttagattgtcaaaaaatgtatcataaatttatatctgatgaattttgcgataagctgatcgaactattaagagaaaaaagaaagtattatgttggtccagggaatgagaaatctagaactgactatggtatttatagaacagatgggacaactctagagaatttatttggaattcttattggtaaatgtacattttatccagatcaatatcgttcttcgagagcgtcctatacagcacaagaatttaattttttaaatgatttaaacaatttaacagtacctactgaaacgaaaaagttaagtcaggaacaaaaagaatttttagtaaattatgctaaagaaacgtcggtattaggggctggaaaaatattgcaacaaattgcgaaacttgcggattgtaaggttgaagatattagggggtatcgtttagataataaggataaacccgaactacatacctttgaaacatatcgagcaatgaaaggtctagttccgttagtagacattggagtattgtcgagagagcagcttgatatattagccgatattctaacccttaatactgattttgaaggaattagagaggccctaaaaaaacaattgccaaatgtatttgatgaaaaacaggtcaaggggttagcaagttttagaaagtcgaaaagccaattatttgcaaaaggctggcacaatctatctcaaaaaattatgctagaggtaattccagaattatatgcaacatctgatgaacaaatgacaatcttaacacgattaggaaagtttgagaagagtagtgttgctgaatatccttcctcaattaatgtagatgagattacagatgaaatatataatccagtcgttgctaaatctatccgtcaaaccattaaaattatcaatgcttcgataaaaaaatgggatgaatttgatcaaattgttatagagatgcctcgtgatcggaatgaagatgaagagaagaagcgaattgcggatggacagaaagcaaatgcaaaagaaaaagcggattcaatcctacgtgcggcagaattgtattgtgctggaaaggtattgccagattatgtctataatggacacaatcagttagcaacaaaaattcgtctctggtatcaacaaggagagcgttgtatttatactggtcagccgatctcaattcatgatttaattcataatcagaatcagtatgaaattgaccatatcttgccactttctttgacatttgatgatagtttatcgaataaggttttagttcttgcaactgcaaaccaagagaaagctcaacgtacaccgtataattatctgaaaagtgctacgtcagcttggtcctatcgtgaatttaaggactatgttactaagcgcaaaggaattgggaagaagaaatgtgaatatctgacatttgaggaagatattaatggatttgaggtgagaagtaagttcattcagcgtaacttagtggatactcgatacgcctctaaagtcattctaaatgccttacaagattatttcaaaatatcagggatacaaacgaaagtttctgttgtaagaggtcaatttacatctcaattgcgtcataaatggggaattgaaaagacacgtgaaacgtatcatcaccatgcggtggatgccttaattattgcagcatcaagtcaattaagactctggaaaaagcaagaaagcccgcttgttgttgattaccaggaaggacgtcaagtagacttagaaactggagaaatcttagaattgacagatgagcaatataaagaacttgtctatcaaccgccgtatcaaggatttgtaaatactatctctagctcggcttttgataatgagatactgttttcttaccaagtagactccaaggtgaatcgtaaaatttctgatgcaaccatttatgcaactcgtaacgcacaacttggaaaagataaaacggaagggatatatgtccttggaaaaatcaaagatatctatacacaagctggatatgaggcatttttgaaacgttatacgaaggacaaaacttcttttctaatgtatcataaagaccttgatacttgggaaaaagtgattgagattattttacgtgactatagagaatatgatgaaaaagggaaagaaataggtaacccatttgaaagatatcgtagggaaaatggttatgtgaaaaaatatagccgtaaaggaaatggtactgcaataaaatcattaaaatactatgataataagcttggaaatcatatcgatattactccagaaaatagtcgaaatgcggtagtattgcagtcattaaaaccttggaggacagatgtatattttaataaagaaacaggcaagtatgaattcttggggattaaatattctgatctatcgttcgaaaaaggtactggagagtatggcataagtcaagaaaagtatgattcaataaaaatagcagaaggagttgcaaaaaaatcgatatttaaatttacactttataaacaagatttattattcataaaagatattgaaaataactttggaaaattacttagattcacttctaaaaatgatacaagcaaacattatgttgaattaaagccttatgataagaataagtttggtacagaggagccactgttaccagtgctaggaaatgttgccaaaagcggacaatgtataaaaggtcttaacaaatcaaatatatctatttataaagtacggacagatattttaggctatcgacactttataaaacaagagggagaacaccctcaattaaaatttaaaaaataa

SEQ ID NO: 77 - DNA, 3369 bp, Streptococcus thermophilus
  source 1..3369: mol_type = unassigned DNA
atgagtgacttagttttaggacttgatatcggtataggttctgttggtgtaggtatccttaacaaagtgacaggagaaattatccataaaaactcacgcatcttcccagcagctcaagcagaaaataacctagtacgtagaacgaatcgtcaaggaagacgcttgacacgacgtaaaaaacatcgtatagttcgtttaaatcgtctatttgaggaaagtggattaatcaccgattttacgaagatttcaattaatcttaacccatatcaattacgagttaagggcttgaccgatgaattgtctaatgaagaactgtttatcgctcttaaaaatatggtgaaacaccgtgggattagttacctcgatgatgctagtgatgacggaaattcatcagtaggagactatgcacaaattgttaaggaaaatagtaaacaattagaaactaagacaccgggacagatacagttggaacgctaccaaacatatggtcaattacgtggtgattttactgttgagaaagatggcaaaaaacatcgcttgattaatgtctttccaacatcagcttatcgttcagaagccttaaggatactgcaaactcaacaagaatttaattcacagattacagatgaatttattaatcgttatctcgaaattttaactggaaaacggaaatattatcatggacccggaaatgaaaagtcacggactgattatggtcgttacagaacgaatggagaaactttagacaatatttttggaattctaattgggaaatgtacattttatccagacgagtttagagcagcaaaagcttcctacacggctcaagaattcaatttgctaaatgatttgaacaatctaacagttcctactgaaaccaaaaagttgagcaaagaacagaagaatcaaatcattaattatgtcaaaaatgaaaaggtaatggggccagcgaaactttttaaatatatcgctaaattactttcttgtgatgttgcagatatcaagggacaccgtatcgacaaatcaggtaaggctgagattcatactttcgaagcctatcgaaaaatgaaaacgcttgaaaccttagatattgagcaaatggatagagaaacgcttgataaattagcctatgtcttaacattaaacactgagagggaaggtattcaagaagctttagaacatgaatttgctgatggtagctttagccagaagcaagttgacgaattggttcaattccgcaaagcaaatagttccatttttggaaaaggatggcataatttttctgtcaaactgatgatggagttaattccagaattgtatgagacgtcagaagagcaaatgactatcctgacacgacttggaaaacaaaaaacaacttcgtcttcaaataaaacaaaatatatagatgagaaactattaactgaagaaatctataatcctgttgttgctaagtctgttcgccaggctataaaaatcgtaaatgcggcgattaaagaatacggagactttgacaatattgtcatcgaaatggctcgtgaaacaaatgaagatgatgaaaagaaagctattcaaaagattcaaaaagccaacaaagatgaaaaagatgcagcaatgcttaaggctgctaaccaatataatggaaaggctgaattaccacatagtgttttccacggtcataagcaattagcgactaaaatccgcctttggcatcagcaaggagaacgttgcctttatactggtaagacaatctcaatccatgatttgataaataatcctaatcagtttgaagtagatcatattttacctctttctatcacattcgatgatagccttgcaaataaggttttggtttatgcaactgctaaccaagaaaaaggacaacgaacaccttatcaggctttagatagtatggatgatgcgtggtctttccgtgaattaaaagcttttgtacgtgagtcaaaaacactttcaaacaagaaaaaagaatacctccttacagaagaagatatttcaaagtttgatgttcgaaagaaatttattgaacgaaatcttgtagatacaagatacgcttcaagagttgtcctcaatgcccttcaagaacactttagagctcacaagattgatacaaaagtttccgtggttcgtggccaatttacatctcaattgagacgccattggggaattgagaagactcgtgatacttatcatcaccatgctgtcgatgcattgattattgccgcctcaagtcagttgaatttgtggaaaaaacaaaagaatacccttgtaagttattcagaagaacaactccttgatattgaaacaggtgaacttattagtgatgatgagtacaaggaatctgtgttcaaagccccttatcaacattttgttgatacattgaagagtaaagaatttgaagacagtatcttattctcatatcaagtggattctaagtttaatcgtaaaatatcagatgccactatttatgcgacaagacaggctaaagtgggaaaagataagaaggatgaaacttatgtcttagggaaaatcaaagatatctatactcaggatggttatgatgcctttatgaagatttataagaaggataagtcaaaattcctcatgtatcgtcacgacccacaaacctttgagaaagttatcgagccaattttagagaactatcctaataaggaaatgaatgaaaaagggaaagaagtaccatgtaatcctttcctaaaatataaagaagaacatggctatattcgtaaatatagtaaaaaaggcaatggtcctgaaatcaagagtcttaaatactatgatagtaagcttttaggtaatcctattgatattactccagagaatagtaaaaataaagttgtcttacagtcattaaaaccttggagaacagatgtctatttcaataaaaatactggtaaatatgaaattttaggactgaaatatgctgatttacaatttgaaaagaagacaggaacatataagatttcccaggaaaaatacaatggcattatgaaagaagagggtgtagattctgattcagaattcaagtttacactttataaaaatgatttgttactcgttaaagatacagaaacaaaagaacaacagcttttccgttttctttctcgaactatgcctaatgtgaaatattatgtagagttaaagccttattcaaaagataaatttgagaagaatgagtcacttattgaaattttaggttctgcagataagtcaggacgatgtataaaagggctaggaaaatcaaatatttctatttataaggtaagaacagatgtcctaggaaatcagcatatcatcaaaaatgagggtgataagcctaagctagatttttaa

SEQ ID NO: 78 - DNA, 4188 bp, Treponema denticola
  source 1..4188: mol_type = unassigned DNA
atgaaaaaggaaattaaggattattttctcggattggatgtaggaaccggatcggttggttgggcagttactgatactgactataaactcttaaaggctaatcgtaaagacctttggggaatgaggtgttttgagacggcggaaactgcggaagtgagaaggcttcacaggggggctaggcgccgtattgagagaagaaaaaaaagaataaagctgcttcaagagcttttttcccaagaaattgcaaaaacagatgagggatttttccaaagaatgaaggaaagccctttctatgcagaagacaagactatattacaggaaaacactctttttaatgataaagattttgccgataagacctaccataaagcctatcctaccataaaccatctgataaaggcttggattgaaaacaaggtaaagccggatccaaggttattatacttagcctgtcataatattataaaaaaaagaggtcattttttattcgagggcgatttcgattcagaaaatcagtttgatacttctatacaagccctttttgaatatctgcgtgaagatatggaagtcgatattgatgccgatagccaaaaagtaaaagagattttaaaggatagctctttaaaaaattccgaaaaacaaagccgcctaaataagattttaggactgaaaccctccgacaaacaaaaaaaagctattactaatttaatatcaggcaacaaaataaactttgccgatctttatgataatccggatttaaaggatgcggagaaaaatagtatatctttttcgaaagatgattttgatgctttgagtgatgatcttgcttccattctaggagattcttttgagcttttattaaaagcaaaggctgtatataactgctcggttctttccaaggtaataggcgatgaacagtatctttcttttgcaaaggtaaaaatatatgaaaagcataaaaccgatttgactaaattaaaaaatgttataaaaaagcatttcccaaaagattataaaaaagtattcggatacaataaaaacgaaaaaaataacaacaattactccggatatgtaggcgtatgtaaaaccaagagtaaaaaactaattataaacaattctgtaaatcaagaagatttttacaaatttttaaaaactatcctttcagcaaaatccgagataaaggaagtaaatgatatattgaccgaaattgaaacagggacttttttacctaaacagatatctaaaagcaatgcggagattccttatcaattacgcaagatggagctggaaaaaatattatcaaacgcagaaaaacatttttcctttttaaaacaaaaagatgaaaaaggtttatctcacagtgaaaagattataatgcttttaacatttaagattccttattatattggacctataaacgataaccataaaaaattttttcccgatagatgctgggtagtaaaaaaagaaaaatcgccttccggtaaaactactccatggaacttttttgatcatatcgataaagaaaaaacagctgaagcatttattacaagcagaaccaatttttgcacatatttagtaggggaatccgttttaccaaaaagttctcttttatattccgagtataccgttttaaatgaaatcaacaatttacagattatcattgacggaaaaaatatctgcgatattaaactaaaacaaaaaatatacgaagatttatttaaaaaatataaaaagattacacaaaaacaaatttcaacttttatcaaacacgaaggtatttgcaataaaactgatgaagtaattattctaggtatcgataaagaatgtacatcttcgttaaaatcatatatagaacttaaaaacatattcggaaagcaagtagatgaaatttctacaaagaatatgcttgaagaaattatacgatgggctactatctatgatgaaggagaaggcaaaacaatacttaaaacaaaaataaaagccgaatatggaaaatattgttctgatgaacagatcaaaaaaattctaaatcttaaattttcaggttggggccgcttgtcacgcaaattccttgaaaccgtcacatcagaaatgccgggttttagcgaaccggtaaatataataactgcaatgcgggaaactcaaaataatttaatggagttgcttagcagtgaatttacatttactgaaaatattaaaaagataaattcgggatttgaagatgctgaaaagcaattttcatatgacggtttggttaagcctctgtttttatcaccatcggtaaaaaaaatgttgtggcagactctaaagcttgtaaaagaaatatcgcatattacccaagcccctcctaaaaaaatatttatagaaatggcaaagggtgcagagcttgaacctgcgaggactaagacaagattaaaaattttacaagacttatacaataactgtaaaaatgatgcggatgcttttagttccgagataaaagacctttcaggtaaaatagaaaatgaagataatttaaggcttcgaagcgacaaactttatctttattacacgcagcttggaaagtgcatgtattgcggtaaaccgattgaaataggccatgtatttgatacaagcaactatgatatagatcatatttatccccaatccaagattaaagatgacagtataagtaatcgggttttagtatgcagcagctgcaataaaaataaggaagataaatatcctttgaagtctgaaattcaatcaaagcaaaggggcttttggaattttttacaacgaaataactttataagccttgaaaaattgaataggttaacaagggccactccaatctcggatgacgaaacggcaaaattcattgccagacagcttgtagaaacaagacaggcgacaaaagtagctgcaaaagtattagaaaaaatgtttcccgaaactaagattgtttattctaaagctgaaaccgtatcaatgtttagaaataaattcgatattgtaaaatgcagagaaataaacgattttcatcatgctcatgatgcatatttaaatattgttgtcggaaatgtatataatacaaaatttacaaataatccttggaactttataaaggagaaacgggataatccaaagattgccgatacttacaattattataaagtttttgattatgatgtaaaaagaaataatattacggcatgggaaaaaggaaaaacaattatcactgtgaaggatatgcttaaaagaaatacccctatttatacacgccaagccgcctgcaaaaaaggagaactctttaaccaaaccattatgaaaaaaggattgggccagcatcctctaaaaaaagaaggtcctttttctaatatttcaaaatatgggggctataataaagtctctgctgcatattatactcttatagaatacgaagaaaaagggaataaaatacgaagcttagaaaccatccctctatatttggtaaaagacattcaaaaagatcaagatgtattaaagagttacttaacagatctgctagggaaaaaagaatttaagattttggttcctaaaataaaaatcaactccctcttaaaaattaacggtttcccttgtcatataacagggaaaaccaatgattctttcttactgcgtccggctgttcagttttgctgttcaaataatgaagttctttattttaaaaaaattataagattcagtgaaataagaagtcaaagagaaaagataggaaaaacaatttctccttatgaagacttatcctttagatcttatatcaaagaaaatttatggaaaaagacaaaaaatgatgaaataggagaaaaggagttttatgaccttcttcaaaagaagaatttggaaatctatgatatgcttttaacaaaacataaggatactatttataaaaaaagacctaactctgcaactattgatatcttagtcaaaggaaaagaaaagtttaaatctttaataatcgaaaatcagtttgaagttattttagagattttaaaactgttttctgccactagaaatgtatcagacttacaacatataggcggaagcaaatattcaggagttgcaaagataggaaataaaatatctagtcttgataactgtattttaatttaccaatcaataacaggtatttttgaaaaaaggattgatttgttaaaggtatga

SEQ ID NO: 79 - DNA, 3957 bp, Lactobacillus animalis
  source 1..3957: mol_type = unassigned DNA
atgggaagtaatatgctgaaaaaagattatagtattgggttggatattgggacaaactcagtgggacatgctgtagttactgatgattataaagttcctaccaaaaagatgaaagtttttggggatacatctaaaaaaacgatcaagaaaaacatgctgggagttttactgttcaatgaaggacagacggcagctgatacccgtttgaagcgcgggactcgccggcgctatacccggcgaaaaaatcgtttgcgctatttacaagagatctttgcaccagaattggctaaggtcgatcctaatttcttatatcgactagaagaaagttcactggtggctgaagataagaagtatgatgtgtatcctatctttggaaagcgtgaagaagaattactgtatcatgatacatataagacgatctatcacttacgcagtgcactagctaataatgatcaaccagctgatctaagattggtttatttggctttagcacatattatcaagtatcgggggaattttttactggaaggtgaaattgatctaagaactactgatatcaacaaagtatttgcggagttcagtgaaactctaaatgagaatagtgatgaaaatttgggtaaactagatgttgctgatatcttcaaaaataatacattctcaaaaacaaaaaaatctgaagaactgctgaaacttagtggggctaagaaaaatcaactagctcatcaattattcaagatgatggtcggcaatatgggtagcttcaagaaagtgctagggaccgatgaagaacacaaattatcctttggaaaggatacatacgaagatgatttgaatgacttattggctgaagctggtgatcaatatttagatatctttgttgctgctaagaaagtgtatgatgcagctattttggcaagtattttagatgtaaaagatacgcaaacaaagactgttttctcacaagcgatgatcgaacgctatgaagaacatcaaaaagacctaattgaattgaaacgagtctttaaaaaatatcttcctgagaaatgtcatgactttttcagtgaacctaagatcagtggttatgcgggatatattgatggcaaagtaagtgaagaagatttctataagtatactaagaagactttgaaggggatccctgagacagaagagatcttacaaaagatcgatgctaataattatttgcgaaaacaaagaacatttgataatggtgcgatcccgcatcaagtccatttaaaagaactagtggcaatagttgaaaatcaaggtaaatactatcctttcttacgtgaaaataaagataagtttgaaaagatcttaaacttccgaatcccgtattatgttgggcctttagcgcgcggaaacagtaaatttgcatggttgacccgagctggtgaaggaaaaataacaccatataactttgatgaaatgatcgacaaggagacttcagctgaagatttcattaaacacatgacgatcaacgatctatatctaccgactgagccagttttgcctaagcatagtttattatatgagagatacactatctttaatgagttagctggtgtcagatatgtgactgaaaatggtgaggctaagtattttgatgcccaaaccaagcgctcgatctttgaactttttaaattagaccgaaaagtaagtgaaaaaatggttattaagcatctgaaagttgttatgccagccatcaggatccaagctttgaaagggttggacaacggaaaattcaacgcttcttacggaacctataaagatttagttgatatgggtgttgcgccagaacttttaaatgatgaagtaaatagtgaaaagtgggaagatatcatcaagactctaactatctttgaaggacgcaaattgatcaaacgtcgcttagaaaactatcgtgactttttaggcgaagatatattacgtaaattgagtcggaaaaaatatacggggtgggggcgcctttcagctaagctgttggatggtatctatgacaaaaagacacataagacgatcttagattgtttgatgactgaagattacagtcaaaatttcatgcaattgatcaatgatgataactattcattcaaggaaacgatcaaaaatgcccaagtgatcgaaaaagaggaaactttggctaaaactgtacaggaattacctggaagtccagctattaagaaggggatcttacagagtttagagatcgttgatgagatcatcaaagtcatgggatataagcctaaaagtattgtagtcgaaatggcgcgtgaaacccagaaaacgcatgggacacggaaacgtgaagatcgagtgcaacagattgtggaaaacttaaaagatgctaatgaattacctgaaaaattgccaagtaatgctgaattgagtgatgaaagaaagtacttgtattgcttacaaaatggacgtgatatgtataccggggctcctctagactatgaccatttgcagttttatgatgttgaccatattattccgcagagctttttgaaagatgattcaatcgaaaataaggtcttaacgatcaaaaaagaaaatgtccgtaagactaatggtctgccaagtgaagccgtgatccaaaagatgggaagtttctggaaaaaattgttagatgctggagctatgaccaacaaaaaatatgacaatctacggcgtaatcttcatggcggattgaatgaaaaactaaaagaacgttttatcgaacgccaattggtcgaaacacggcagatcactaaatatgtggcacagctcttagaccaacgactaaattatgatggaaatggtgttgaacttgatgaaaaaattgcgatcgttactctaaaagctcagttagcttcgcaatttaggagcgaattcaaactgcgcaaagtaagagcgctcaataatttacatcatgctcacgatgcttatcttaatgctattgtagccaatttgatcatggcaaaatatcccgaattggagccagaatttgtctatggtaagtaccgcaaagctaagtttaaaggtttaggcaaagctacagctaaaaataccttatatgctaacgttttatatttcttaaaagagaatgaagtatatcctttctgggataaagcacgtgatctcccaacgatcaagcgttatttatatcgggcacaagttaataaagttcgcaaagctgaacgccaaatcggtggcttttctgatgaaatgttggtacctaagagtgattcaggtaagctactgccacgaaaagaagggctcgatccagttaaatatggtggctatgccaaagcggtagaaagttatgcggttttgatcactgcagatgaagtcaaaaaaggcaaaacaaagaaagtgaaaactttagtaaatattccgatcatagatagtaagaaatatgaggctgatccaactgcatatttagctagtcgtgggtatacaaacgtcacaaatagttttattttgcctaagtatagtctgcttgaagatccagaaggtcgtcgtcgttatctagcaagtttcaaggaatttcaaaaagcaaatgaattgatcttgccacagcatctagtagagttgctctattgggtcaatgcaaaagatggagagcaaaaattagaggatcataaagctgaatttaaagaattatttgataagatcatggagtttgcggataagtatgttgttgcacctaaaaattcagaaaagatcagacgcttatacgaagaaaatcaagatgctaccccaatggaattgggtaagaactttgttgagctcttgagatatacagctgatggtgctgcgagcgatttcaaattctttggcgaaaatattccacggaaacgatataattcggcaggaagtttgctcaatggaacattgatctatcagtcaaaaacggggttatatgaaacaaggatcgatctaggtaaattataa

SEQ ID NO: 80 - DNA, 4188 bp, Lactobacillus ceti
  source 1..4188: mol_type = unassigned DNA
atgagtaaaaaatatcaaaacacaaagtattatgtagggcttgatatcggaacgtcgtctgttgggtgggctgtaacagacgcgaattatgagttattaaaagttaatggtcataagacatggggatcaagattattcacagaggctgaaacggcacttgaacggcgaacacaccgcgctactcggagaagactgcaaagaagaaaacaaagactggatttattagatgaattatttgctgaagaacttgctaaagtagatccacagtttttacttcgtttgaaggaaagtcagtatcatatggaagataaaagtacagatgataagtatgttttgtttaatgatcaaaatagaacagatggagaattttttacagagtatccaacgatttatcatttgcgtagtgaattaatgcaagggaaaaaagaggatatacgtgcagtatatcttgcattacatcatatcgtgaaatatcgtggccacttcttattacctggagataattatgatatgcaaggtaatttaagtgaactgattaagaggctgtttaaatttattgaagaaactttatttattgaagatcttggattgacggatgaaattcaatccaaaatagaagaaattttattgacaaagacaaaaactcgtcttgatcgccaaaaagaaattgtcaaactttttaatacaaaacatcaaaaattagatgataaacaaaaaaaattattagaagctatttttaaattatgtttaggtcttaaaggtaatatggttaatatttttggtgacaaaggtgaatatggaattgattttactgatgtcgaagataagaagaaaaaggtagaatttagtgctgattatgataataacattaatgactatgtagatttctttggtgaatattttgaattgttagaaattacgaaaaaaattaatgatacagttattttttctgaaattttagtcgatggaaaaggtttttctgaatctaaagtaatttcttatgaaaaacatcaacaagatttgcgcaaattaaagacactcttgaagagtctagataaaaccttggggtataaatacggagaaggattataccaaaaaatattacttgatgatgtaaaatctaattatgttaattattcaggaaattctcaaaaattaaaaaaatgtactaaagatgagttttatgggtttatcaagagtaagttaaattcagttaccaagaaagaaaaggtttctgaagctcaacaaaaagaaatcgctcagattctcgctgatatggaatttggtgattatctaccgctgcaacgtacaactgataatggtgttattccaaaccaattacacaaaaaggaattaattgaaattattgaacaacaaactaagtatcatgattttttcaatgatgtagatgaaaatgggctaactattaaagataagattatttcattaatgacttttagaataccttattatgtcggaccattgaatgattatcataaagttgctgatggaacaggacatgcttggattgaaaagaaaaaagacggtaaaatctatccttggaattttgatgagatggttgatacagaggctactgcagaaaaattcattaaaaatttgacgaataaatgcacctatttaaaaggtgaagatgtattgccaaaagaatcgaagctgtattctgaatttatgttattaaatgaacttaataatattaaaatagataatcaaaaattggatcctaaattgaagatgaaaatggtatcagagttgtttatgaaaaaaaacgaaaagataacgaagaaaaaaattgttgattacttacgctcaattggtcaagctaatggtaacgagatggttagtggaattgatcgggaaatcaaatctgatctgaaaactattcataaaattcaacattattaccaagacgcatcgctagaaatggcggaaaatattattcgttggaataccatttttaatgattctacttctgacatattaaaggataaaatcacaaaagcatatggtgatgtattaactcctggtcagattaaaggattgtctaatctagcatgtaaagattgggggaaattatctgaaaaattcttaacaggtattcgttgtgatgtgggagaatttaaaaatattagtattattcaagctatgcgagatactaataataacttgatggaattattatcgaataaatatgaatttatggataagattcaagaatacaataaagaatattatggtgattttaccttcaaagcagaaccctctattatggatgatttatatgtgggacccggtccgaaaagagctatttggcaagcggtacggattgttgaagaaattaagcggattatggggcatgatccagaaaaaatctttcttgaaacaacaagaactaatcgggcaccaaaggttaagaacactaaacgttatgatgcgttagaaaaaaagtatgagtccgttaaagagcacgaatatgcagaagtaaagaaagaatttgaaattgaaaaaaatgatagtttaaatataaagaagttatttctttattttacacaactcggacactgcatgtattctgacgaaaaaattccttataatgaattattcactaatcgttatgatattgatcatatttatccacgaagtaaaacaagagataactctatggacaatctcgtattggtgaaagcagaatgtaatagagataagaaagataattatccaattaagcttaaaacaaatattcaacagaaatgtcaggttcgttgggcatatttacgtgataaaaaacttattactgaagaaaaatataatcgcttagtgcgtaaaacaccattaactgaagatgaattgtcacaatttattgccagacaattagtgtttacatcacaatctgtcaaagcaacagcggaagtatttaaaaggttatatgaagattctaaaatttgttatgttaaagctgagaatgttagtgactttagatatggttcaactagaaaaatgagtaaagatgatcaaccgcaaccttttatcaaaaatcgcgatgtgaatgattttcatcatgcgaaagatgcttatttaaatattgtagtgggtaatgtatatgatgttaaattcacacaaaatccaacgagatttattaaagcaaataaagattatagtttgaattatatttttagatatcctgtgaataaaaaaggtgagaatgtttgggatccagaacaatcgatgaagatagtggaaaaaacattgaaaagcaatgatgtgcgtgtcactaaattagtgaagccaatcactagtccaatatccaacgaaactcttcataaagcattaaaatgtaaacctggttcttatttaccacgtaaatcttctaaaggaacacccttggcagatgtgactaaatatggtggatatgaaaagattaaaaatgcatattacagtatttataaatatacctatatgaagaaaaaagaatgtatggaagagtttctacttgtacctataccaattcatttggtgaataacgatgaagaattaccaaaatatataaacgataagatagccgaaagagcaaaaaagaaaaaattggaaacagtcgagtgtattgtaaaagaattatatcaaggaactttagttagaataaatgggtatgattatcgtattgcaggaagttcgggaaaacaattcgaattgcataatgggattaatctgattgttgaaccttgggttgaaaaagttctgaaagaaacagataaattcgtgcgaaaatctaattcaaaattagataaaaaacaacaaaaagagaatacaactgaaactctgattgaaaaacaattaaatgatgtatttgaatatctctgtcggaaattaaatcaaggcatattcaaaaacaacaaacatacattacctgctaaactgttgggggatagtattcaaaaacgttttgaagatgctagtattgaagatgaatttgaggttataaaagaattgataagtgctatagcgaagaatcctcagaatttcaaaacgattcaaaaagtactagatatatccggcagttcgataccaagatttaatttaaagcttacaaaaaataatgtagacgagtttattattaaaaatgaatcggtgactggtttatttacacatgagaaagttatttttagaaaatag

SEQ ID NO: 81 - DNA, 4203 bp, Tissierellia bacterium
  source 1..4203: mol_type = unassigned DNA
atgggaaaacaaaaatttaatgattactatttaggatttgacatcggaactaactctgcgggctgggctgttacagacttacagtataaacttttaagattcaataaaaaagatatgtggggaagtaggctgtttgatgaagcacagacttctaaagaaagaagagtttacagaaatagtagaagaaggcttgatagaagaaaaaaacgtttaaaacttttagaagaactatttttagatgaaatttcaaaaattgataatactttttttaaaagacttaaagaaagtaatttgtataatgaagataaatcgattaagtttaattatcctttatttaacgacaaagactatacggatattgacttttacaatgaatataaaactatatatcatttgagaaaagatttaatttttgaggataaaaaatttgatataagacttgtatttatagctttgcatcatattttaaaatatagaggtcattttatctttgaaggacaaagttttgaagaaataaaaagttttgattctatttttacacaattatcatcttattttttagaaaattttgattttaatatagatgtaagtataaaagaaaaattagaagaaattattttaagcgataatactaaatcaataaagaaaacagaatttaaaaagatattttcagataacaaagtattgtctgttttaaatatggcaataggaagtaaagtttctcttaaagatgtttttaacaatgaagagcttaaagagcaaaaaattagtttttctgaaattgattatgaaaacgaaaaaagagatgaattttatcagcttttaggagaagatatttttttaatagatttagcaaagaaaatttatgattttatggttttaaagaaaatactaaaaaatactgatagtttttctgcatctaaagtagctttatattgtgaacataaaaaagatttagacgatttaaaatatattttcaaaaaatatttaacaaaagaagattattttaaattttttagaagtaatgtagaaaaaattaattatccaagttatattgggttaaataaaataaagtcaaaaaaaataattaaagaaaataaatgtagtatatctgatataaataaggaattaaaaaacaaatatcttaaagatataaaattagaagctaaagataaagagttatttaatcgtatttttaataaacttgatgaatttaaatttttagaaaaattaaaaagtagtgaaaattcaaccgttccttatcaagttcatgaaatagaattaaagaaaatacttgataatcaaagaaaatactatccgtttttaaatgaaaaaatcgacggaaaaagtgtttatgaaaaaatcatacaactttttgaatttaaaattccatactatataggacctcttaatacagatcctaatgtaaaaggcaaaaatacttgggttgttagaaaagatgaaaataataaaactccaataactccttggaattttgaacaaaaagttgacatgcaaaaaagtgctgaggaattcattaagagaatgacaaacagatgtacttacttaaaagcagaagatgttatagcaaaaaactcactattatatgaagaatttattcttcttaatgagttaaataaagttacagttgataatgaaattttacatcctactttaaaaactgaaataataaatgaattgtttaaaacaacagttaaagttacaaagaaaaaatttattgagtttttgaaaaaaaagcaagctgtaaatgatgttgagagcattactggaataggtgttgagtttaattgtaagctacaaggatataacacatttagaaaaattttaggtaaaaagatagaaaacgtaaatgtaaaaaattttgtagaaaagtgtatagagcttaaatgcttatatggaagtgataaaaaattatttgaaaatgcaattggaaaaatatatagagaatataatataacagatgaagaatttaataaaattaatagattaaattttaacaaatgggcaaggctttctaaaaaatttctaacagaaataagttttgaaaaaactgatggtacaaaaagatttgaaagtgttatagaagcgttaagaagtactaactataatttaatggaacttttatctgataaatttaatttgcaatctaaaatagatgaaattaatggagaagatgatttttctaatatagatataaaagaatatgtagataaattatatgtttctccatctgttaagcgttctattattcaaacttataaaattgctatggaaataaagaaaattacaaagaaagatcctaaaaaaatattcattgaaatggcaaaagataaaggagaaaaaggcaaaactacagaaaaaagaaaagataaaataaaaaaattatataaaaatatcaaagataccctttctgattattgcaataatttacaagatttaactttgcaagttgaaaagtatgatgataatagattaagacaaaagaagttatttttgtattttatgcaaatgggaaaatccatgtatacaggaagatgtatagatttagaagatttatttaataataatgtttatgatattgaccatatatatcctcaatcaaaagtaaaagatgatagttttgataatattgtactagttgaaaaagaagaaaatcatagaaagtcaaatgaacttcttaaagaagaaattcaatctagaatgaataattactggatatttttaagagaaaataaattcatttcaaaagaaaagtataatagacttacaagaaaaaaagattttacagatgaagaacttggcgattttgttgcaagacagcttgttacaacaagacaatctacaaaagagattgcaaaattttttgaaaaaatatttgaaaaaacaactgttgtatattcaaaagcttccttagtaagtgagtttagagaaaagtatgatatcataaaggtaagagaagtaaatgacgctcaccacgcacaagatgcctacttaaatatagtcgtaggaaatgtctttaatactaaatttactaaaaattattggaaatttacaaaagatataaaaagacaaaacgaagaaaatcctaatgaaaaaaaaggatacaacttaagaaagatttatgaatctgatgttttttgtaacgatagtgttgcttgggtatattcaaaagaaaatccgaaatacaatacaataaataccgtaaaagatatggtatacagaaaaactgcaaatataacaagaatgcttgtagagggaaaaggacaactatttaatttaacaataaaagataaaacacaattaaagaaaaatgttggaaatatagttgcaaacactcctatatctttaaaaaataggaaattacatttaaatagcgttgaaattgctaaaaaatatggttattttgattctttaaataatgcttattttgttttgtttaagtatgaagaaaaaggaaaagaaaagattggatttgactcaataactattgcctataaagaaaggttaaaaaagaatttagatatagaaaagtttttagaaaataaaggatataaaaattctaaattgataagaaagatatttaaaaatcaaaaagttttaataaacggatatccttatttattaaaatcatttaacaaacaaagtcaaattaaatttaataatttcaaaatattatatcttaatgaaaataatttaaaatttgcaaaagatgcaataaaatttgaaaaaaataatgctaatgttgatttgaaaaagcaaaaatatatagtaagttttctaaaaaagaaaaagcaaaacgaaattaatgaaacttatgaagaatgtattgatagattaaatgatgaatttgatacactatttttaaaactttgcgatattcaaaaatcatcaatatatacaaattacaaattacaagattttagttcaaataaaaaatcaattgaaattaaagataaatttgatatttttaaaagtttagatttatataaaaaatctaaattaataaaagaatttttaaactattataaatatgagaaaaacgacttagattttagtcttatagatattgataaaaaagcaaattgtattcaaaaacattttacagaagatctggttaaagattttgttattgttgatgagtctgttacaggattgtttgtgaaaaaagaaaggcttaaataa

SEQ ID NO: 82 - DNA, 4197 bp, Veillonella parvula
  source 1..4197: mol_type = unassigned DNA
atggaaacgcaagcatcgaaccaacttatttcaagtcatttgaaaggatatccaattaaagattattttgtggggttagatattggtacaagctcagtgggctgggcagtaaccaataaggcctatgagttgctgaaatttcgatctcataaaatgtggggaagtcgtttgtttgatgagggagaatccgctgtagcacgtcgtggattccggtccatgcgtcgtcgtttggaacgtcgtaaattacgcttaaaactattagaagaattgtttgctgatgctatggcacaggtggatcctacattctttatgcgccttcgtgaaagtaagtaccactatgaggataaaacgaccggtcatagttcaaaacatattttgtttatcgataaaaactataatgatcaagattattttaaagagtatcctactgtttatcatttgcgttcagaattgatgaaatctggtactgatgatattcgcaaactatttttagctgtacatcatattttaaaatatcgtggtaacttcctttatgaaggggctacatttgactctaatgcttcaacgcttgatgatgttattaaacaagctttagaaaatattacatttaattgctttgattgtaattctgctattagctctatagggcaaatccttatggaggctggaaaaacaaaatctgataaagccaaagccatagaacatttggttgatacatatatagctactgatacagtagatacttctagtaaaactcaaaaagatcaagtcaaagaagataaaaaaagacttaaagcatttgcaaatttagtattaggtttaaatgctagtcttatagacttgttcggctctgtagaagagttagaagaagatcttaaaaagcttcaaataacaggagacacatatgacgataaacgagatgagctagctaaagcttggagtgatgagatttatattattgatgattgtaaatctgtatatgatgctattatactcctgtccattaaagaacctggtcttactatttctgaatctaaggtaaaagctttcaacaagcataaagatgatttagctatattgaaatctttactaaagtcggatagaagcatttacaatacaatgttcaaagttgatgaaaaaggtctacacaactatgtgcattatattaaacaaggtcgtactgaggaaactagttgtaaccgtgaagatttttataaatacactaagaaaatagtagaaggactatctgattctaaggataaagaatatattcttagtcaaattgagctacaaatattattaccattacaacgaattaaagacaatggtgttattccttatcaattacatttagaagaactcaaagcgatccttgctaaatgtggtcctaaattcccatttttaaatgaagtggcggatggtttttctgtagcagagaaacttattaaaatgcttgagtttcgcattccgtattacgtagggcctttaaatactcatcataatgtagataacggtggttttgcttgggcggttcggaaagcatctggacgagtaactccgtggaattttgatgataaaattgatcgggaaaaatcagcagcagcttttatcaaaaaccttactaataaatgcacttaccttttgggcgaggatgtgctgcccaaatcatcacttttgtatagtgagtttatgttgcttaacgaactaaataatgtacgtattgatggtaaaccattagagaaagtggtaaaagaacatcttattgaggctgtatttaagcaagaccataaaaagatgactaaaaatcggatagagcagtttttaaaagataatggttatatttcagaaactcataaacatgagattacaggtctagatggggaaattaaaaatgatttagcctcttatcgtgatatggttcgtatccttggcgatggttttgatagatctatggctgaagagattattacggatattactatctttggtgaaagtaaaaaaatgttgcgagaaacattgcgtaaaaaattcgcttcgtgccttgatgatgaagctatcaagaagctgacaaaattaagatatcgagattggggccgtctctcccaaaaattactgaatggtatcgagggatgtgataaagctggtgatggtacgcctgaaactattattatattgatgcgtaatttcagctataacttgatggaattattaggcgataaattctcttttatggaacgtattcaagaaataaatgctaaattaacagaaggtcaaatcgtgaaccctcatgatattatcgatgatttagcgctttcaccagctgttaagcgtgcggtatggcaagcattgcgcatcgttgatgaggttgcacatattaaaaaagcgttaccggctcgtatctttgtagaagtaacacggtcaaataaaaacgagaaaaagaaaaaagactctcgtcaaaaacgattatctgatttatatgcagcgattaaaaaggatgatgtgttattaaatggccttaataatgaaatctttggggaactgaaatcaagtttggctaaatatgatgatgcggctttaagaagtaaaaagttgtatctatattatactcaaatggggcgctgtgcttataccggtgagattatagagctaagtctgttaaatacagataattatgatatcgaccatatttatcctcgtagccttaccaaggatgatagttttgataacttagtgttatgtaaacgaactgcaaatgctcagaaatcagatgcatatccaattagtgaagaaattcaaaagacacaaaagccattctggacattcttaaaacaacaaggtcttattagtgaacggaaatatgagcgtcttactcgcattacaccacttacagctgatgatttaagtggctttattgctcgtcaactagtagaaactaatcaatctgttaaggctgccacaacattactgcgtcgtctttacccaggtgttgatgtagtctttgtaaaggctgaaaatgtaacagacttccgtcatgataataactttatcaaagttcgctcattgaatcatcaccatcatgctaaagatgcttatttaaatattgttgttggtaatgtatatcatgaaagatttactcgtaacttccgtgcattctttaaaaagaatggagctaatcgtacatataatttagcgaagatgttcaattatgatgtaaattgcacaaatgctaaagatggaaaagcttgggatgtaaaaacaagcatggatactgttaagaaaatgatggacagcaacgatgttcgagtgacgaaacgtttattagaacaaactggtgcattagctgatgcaactatatataaagctactgttgcagggaaagctaaagatggtgcttatatagggatgaaaaccaagtctagtgtgtttgcagatgtttctaagtatggtggcatgacaaaaattaagaatgcctattctattattgttcaatatacaggtaaaaaaggcgaagtgattaaggaaatcgtgccattgccaatctatttaacaaatcgaaatacaactgatcaagatttaattaattatgtagcatctattattccacaagcaaaagacatttctatcatttatggaaaactgtgcattaatcaattagttaaggttaatggattctattattatttgggtgggaaaactaatagtaaattctgtattgataatgcgattcaagttattgtttcaaatgaatggattccatacctcaaagtgcttgagaagtttaataatatgagaaaagataataaggatttgaaggcaaatgttgtatcaacaagagctcttgataataagcatacgatagaggttagaatcgtagaagagaaaaatatagagttctttgattacttggtaagtaaacttaaaatgcctatatatcaaaaaatgaaagggaataaagcagctgaattatcagaaaagggatatggtttatttaaaaaaatgtctttagaagaacagagtattcatttgatagagcttttaaacttattaacaaatcaaaaaactacttttgaagttaagcctttaggaataacagcatctagatcaactgtggggagtaaaataagtaatcaagatgaatttaaagttatcaatgaatccattacaggattatattctaatgaagtaactatagtttaa

SEQ ID NO: 83 - DNA, 3393 bp, Streptococcus gallolyticus
  source 1..3393: mol_type = unassigned DNA
atgacaaatggaaaaattttaggtttggatattggtattgcatctgtcggtgttggtattattgaagcgaaaactggtaaagtagtccatgctaattcacgtcttttttctgctgcaaatgcagaaaataatgcagagcgaagaggattccgtggctcaagacgcttaaatcgtcgtaaaaaacaccgtgttaaacgagttcgtgatttatttgagaaatatgagattgttactgattttagaaatttgaacttaaatccttatgaacttcgtgtaaaaggattaacagaacaacttacaaatgaagagctatttgctgctttacgaacaatctcaaaaagacgagggatttcatacttagatgatgcagaagacgattcaactggtagtactgactatgcaaaatctattgatgaaaaccgtcgcttgctaaaaaccaaaactcctggtcaaattcaattggaacgtttggaaaaatatggtcagttacgaggcaattttactgtttatgatgaaaatggtgaggctcatcgattaatcaatgttttttcaacttctgattatgaaaaagaggcacgtaaaattttagaaactcaagcggattacaataaaaaaattactgctgagtttattgatgattatgttgaaatcttgactcaaaaaagaaaatattaccatggaccaggtaatgaaaaatctcgtacagattatggacgttttcgcacagatggcacaacgctcgaaaatatttttggcattttaattggtaaatgtagtttttatcctgatgagtaccgtgcctcaaaagcttcttatactgcacaagaatataactttttaaatgatttaaacaatttaaaagttccaacagaaactggtaaattatctacggaacaaaaggaagctttagttgaatttgctaaaagtactgcaacgttaggtcctgctaaattattaaaagaaattgctaaaatactagattgtaaagttgatgaaattaaaggatatcgtgaagatgataaaggcaaaccagacttacatacatttgagccttatcgaaaattaaaattcaacttagattcagttaacattgatgatttatcaagagaagtccttgacaaattagctgatattttaacgcttaatacagaacgtgaaggtatcgaagacgctatcaggcataatttgccaaatcagtttactgagggacaaatctccgaaatcattaaggttagaaaaagtcaaagcacagctttcaataaaggttggcatagtttttcagctaaactaatgaatgaattaattcctgaattgtatgcgacatctgatgaacagatgacaattctaacaagattagagaaattcaaagttaataaaaaatcatcaaaaaatacaaaaactattgatgaaaaagaagtcacagacgaaatttataatccagttgtagctaaatctgttcgacaaacaataaaaatcattaacgcagcagttaaaaaatatggtgattttgataagattgttattgaaatgccacgtgataagaatgctgatgatgagaagaaatttattgataaaaggaataaggaaaataagaaagaaaaagatgacgctttaaaacgcgcagcttatctttataatggtactgataaattacctgatgaggtctttcatggaaataaacagttagaaacaaaaattcgactttggtatcaacaaggtgaacgttgtttgtattctggcaaaccaattccaattcaagagttagtacataattcaaataactttgaaattgatcatattttacctctgtcgctttcttttgatgatagtttagcaaataaagtattagtttatgcttggacaaatcaagaaaaaggacaaaaaactccttatcaagtaattgattctatggatgcagcatggtcatttagagaaatgaaagactatgtcttaaagcaaaaaggactcggtaagaaaaaacgtgactatcttttaacaacagaaaatatcgataaaatcgaagttaaaaagaaatttattgagcgtaatttggtagatacacgatacgcatcgcgtgttgtccttaatagtctccaatctgcattaagagaattgggtaaagatactaaaatttctgttatcagaggtcagtttacatcacaactacgtcgaaaatggaagattgataaatcgcgtgaaacgtaccatcaccatgctgttgatgctttgattatcgctgcttcaagtcaattaaaactgtgggaaaaacaagataatccaatgtttgtggattatggaaataatcaagttgttgataaacaaacaggggaaattttgtctgtttctgatgatgaatacaaagaattggtattccagccaccgtatcaaggttttgttaacatgatttcaagtaaagggtttgaggacgaaattttgttctcttatcaagttgattcaaaatataatcgtaaggtatctgatgcaactatctactcaacgcgaaaagctaaaattggaaaagataaaaaagaagagacttatgttttagggaaaattaaagacatttacagtcaaaatggatttgatacctttattaagaaatataacaaagataagacacaatttttaatgtatcaaaaagatcctctaacttgggaaaatgtcattgaggtgattctaagagattatccaactacaaaaaaatctgaagatggaaaaaatgatgtcaaatgtaatccatttgaagaatatcgtagagaaaacggcttagtctgcaaatacagcaaaaaaggaaaaggcacaccgattaaatctcttaaatactatgataaaaaattgggaaattgcattgatataacgcctgaaggaagcaaaaatgaagttgtactgcaatctttaaatccttggcgtgctgatgtttactttaatcctgagactttaaaatatgaactgttgggattgaaatattctgatttaagttttgaaaaaggtactggtaagtatcatatttcacaagaaaaatatgatgtgataaaggaaaaagaaggcattggtaaaaaatctgaatttaagtttactctttaccgaaatgatttgattttgatcaaagatacagctagtggtgagcaagagatttatcgattcttatctagaaccatgccgaatgtcaaacattatgcggaattgaaaccatacgataaagagaaatttgataatgttcaagaattagttgaggctttgggagaagcagataaagttggacgttgtataaaaggtttgaataaatccaacctctcaatctataaagttcgcacagatgttcttggaaacaagtattttgttaaaaaagagggcgataaacctaagttggattttaaaaataataaaaaataa

SEQ ID NO: 84 - DNA, 3165 bp, Staphylococcus pasteuri
  source 1..3165: mol_type = unassigned DNA
atgaaagaaaaatatattttgggtttagatttaggtattacatcagtaggatatggaattattaattttgaaactaaaaaaattatagatgcaggagttaggctttttccagaagcaaacgtagataataatgaaggtcgtagaagtaaaagaggatctagacgattaaaaagacgaagaatacatagattagaacgagtaaaattattactcacagaatatgacctaataaataaagaacaaataccaacatcaaataatccttatcaaattagagttaaaggactaagtgaaatattaagtaaagatgaacttgctattgctttattacatttagcgaaaagaaggggaattcacaacattaatgttagtagtgaagatgaggatgcctccaatgagttatctacaaaggaacagattaatagaaataataaactattaaaagataaatatgtttgtgaagtacagttacaaagattaaaagaaggacaaataaggggagaaaaaaacaggttcaaaacaacagatatattaaaggaaattgatcaactccttaaagtgcaaaaagattatcacaacttagatatagatttcattaaccaatataaagaaatagttgaaacacgtcgagagtattttgaaggaccaggacaaggtagtccttttggatggaatggtgatttgaagaaatggtatgaaatgttaatgggacactgcacatatttcccccaagaattacgaagtgtaaaatatgcatattctgctgatttatttaacgcattaaatgatttaaataatctcataatacaaagagataattctgaaaaattagaatatcatgaaaaatatcatattattgaaaatgtatttaaacaaaagaaaaagccaactttaaaacaaattgctaaagaaataggggtaaatccagaagatattaaaggttatagaataacaaaatctgggacaccgcaatttacagaatttaaattatatcatgatctaaagtcaattgtgtttgataaaagtattttagaaaatgaagctattttagaccaaattgctgaaatattaacaatctatcaagatgagcagagcataaaagaagagctaaacaaattaccagaaatcttaaatgaacaagataaagctgaaatagctaaactaataggatataacggaacacatcgcttgtcattaaaatgtattcatttaattaatgaagaattatggcaaacatctagaaaccagatggaaatctttaattatttgaacattaaaccgaacaaagtcgacttatccgaacaaaataaaataccaaaagatatggtgaacgactttattttatctcctgtagtgaaaaggacttttattcaatcaataaatgttatcaataaagtgattgaaaaatacggtatacctgaagatatcattatagaattagctcgagaaaataatagtgatgatagaaaaaaatttattaataacctacaaaagaaaaacgaagcaactcgtaagagaataaatgaaataattggccaaactggaaatcaaaatgccaaaagaattgtagagaagataagattacatgatcaacaagaaggtaaatgtttgtattcattagaaagtatagctttaatggatttgttaaataatcctcaaaattatgaagtcgatcatattattcctcgttctgtagcatttgataactcaattcataataaagtgttagttaaacaaatagaaaatagtaaaaaaggtaatagaacaccataccaataccttaattctagtgatgcaaagttatcatacaatcaatttaagcaacatatcttaaatttaagtaagtcgaaagatagaatttctaagaaaaagaaagactatttattggaagaacgggatattaataaattcgaagtacaaaaggaatttatcaatcgaaatttagtagatacaagatatgcgactagagaacttactagctatctaaaagcatattttagtgctaataacatggatgtaaaagttaaaacaattaatgggagttttaccaatcatttaagaaaagtatggagatttgataaatatagaaatcatggttacaaacatcatgctgaagacgctttaataatcgcaaatgcagattttttatttaaagaaaataaaaaattacaaaatacaaataaaattttagaaaaaccaacaattgaaaataatactaaaaaagtaacagttgaaaaagaagaagattataacaacgtgtttgagacacctaagcttgttgaagacattaaacaatacagagattataaattttctcatagagtagataagaaaccgaatagacaacttattaatgacactttatattctacaagaatgaaagacgaacatgattacattgttcaaactattacggatatttatgggaaagataatactaatttaaaaaagcagtttaataaaaatccagaaaaatttttaatgtaccaaaatgatccaaaaacttttgaaaaattatcaattataatgaaacagtattctgatgaaaaaaacccgctagctaagtattatgaagagaccggagaatatttaacaaagtatagtaaaaaaaataatggtccaattgttaaaaagataaagcttttaggaaataaagtagggaatcatttagatgtaacaaataaatacgaaaattctacaaaaaaattagtgaaattatcaattaaaaattataggtttgatgtttatttaactgaaaaaggatataaattcgtaacaattgcttatttaaatgtatttaagaaagataattattattatatccctaaagataagtatcaagaattaaaagaaaagaaaaaaattaaagatacagatcaatttattgccagtttttataagaatgatttgattaaactaaatggcgatttgtacaaaattattggtgtgaatagtgatgacagaaatatcattgaattagattattacgatattaaatataaagattactgtgagataaataatattaaaggtgaaccacgtataaagaaaacaattggtaaaaagacggaatcaattgaaaaatttacaacagatgttttaggtaatttgtatttgcatagtactgaaaaagcaccacaattaatatttaaacgaggtctttaa

SEQ ID NO: 85 - DNA, 4014 bp, Enterococcus faecalis
  source 1..4014: mol_type = unassigned DNA
atgaagaaagactacgttattggtctggatatagggactaattctgtcggctgggcagttatgacagaagactatcagttggtgaagaaaaaaatgcctatttatggaaacactgaaaaaaagaaaatcaagaaaaatttttggggtgtgcgtttatttgaagaagggcatacagccgaagatcgccgattaaaaagaacagcacgacgaagaattagtcgtcgacggaatcgtttacgctacttacaagctttttttgaagaagcgatgacagatttggatgaaaacttttttgctcgtttacaagagagttttttagtgcctgaagataagaagtggcacagacatccgatttttgctaagttggaagatgaagtagcttaccatgaaacgtatccgacaatctaccatttacgcaaaaaattagcagattcatctgagcaagcagatttacgactaatttatttggcgttggcacatattgtcaaatatcgtggacattttttaattgaaggaaaattaagtacagaaaatatttctgttaaagaacaatttcaacaatttatgatcatttataaccaaacctttgtgaatggagagagtcgcttagttagtgcgccattacctgaatctgtcttgattgaggaagagttgactgaaaaagcttctcggactaaaaaatctgaaaaagtcttacaacaatttcctcaagaaaaagctaatggcttatttggtcagttcttaaagctaatggtagggaataaagctgactttaaaaaagtttttggtttggaagaagaagccaaaataacctacgctagtgaaagctatgaagaagatttagaaggcattttagcaaaggttggggatgaatatagtgacgtgtttttagctgctaaaaatgtgtacgatgcagttgaattatcaacgattttagcagattcggataaaaaaagtcacgcgaaattatcttctagcatgattgtccgttttacagaacaccaagaagatttaaaaaaattcaaacgatttattcgtgaaaattgtccagacgaatatgataatctctttaaaaatgaacagaaagacggctatgcaggctacattgcacacgcaggtaaggtttcacagcttaaattttaccagtatgttaagaaaatcattcaagatattgctggagcagaatattttttagaaaaaattgctcaagaaaactttttaagaaagcaacggacctttgataatggggtgattcctcatcaaattcatttggctgagttacaagcaatcattcatcgtcaagcggcctattatccatttttaaaagaaaatcaagaaaaaattgaacaactggttacatttcgaattccttattatgtcggaccattatcaaaaggagatgcaagtaccttcgcttggttaaaacgtcaaagtgaggaaccaattcgtccttggaaccttcaagaaaccgttgatttggaccaatcagcgacagcctttattgaacgaatgaccaattttgatacgtatttaccttctgaaaaagttttaccgaaacatagtttgttatatgaaaagtttatggtatttaatgaattgaccaagatttcttatacggatgatcgaggcatcaaagccaatttttcaggtaaggaaaaagaaaaaatctttgattatctgtttaagacgcgtcgaaaagttaagaaaaaggatatcattcaattctatcgaaacgaatataatacggagattgtcacgcttagtggacttgaagaagaccaatttaatgctagttttagcacgtatcaggatttactgaaatgtggtttgacacgagcagaattagaccacccagataatgccgaaaaattggaagatatcataaaaattttaactatttttgaagatcggcaacgaattcggacgcaactttctacattcaaagggcagttctcagcagaagtactaaaaaaattagaacgcaagcactacactggctggggaagattgtcgaagaaattaatcaatggtatctacgataaagaatcgggtaaaacaattttggactatttagttaaagatgatggggtctcaaaacactataatcgcaattttatgcaactgattaatgattcacaattatcttttaaaaatgctattcaaaaagcacagtccagtgaacatgaagaaacattaagtgaaactgtcaatgaattagctggtagcccagcaataaaaaaaggaatttatcaaagtttaaaaattgtcgatgaactagtcgcgattatgggttatgcgcctaagcggattgttgtcgaaatggcacgtgaaaatcaaacgactagcactggcaagagaagatccatccaacgcttgaaaatagttgaaaaagcaatggccgaaatcggcagcaatttattaaaagaacaaccaacgactaatgaacagttacgagatacccgtcttttcctttactatatgcaaaatggtaaagatatgtacacgggagatgaattatcgcttcatcgtttatctcactatgatattgatcatattatcccacaaagttttatgaaagacgattcattggataacctagttttagtgggctctactgaaaatcgagggaaatccgatgatgtacctagcaaggaagttgttaaggatatgaaagcttattgggagaaattatatgctgctggcttaattagtcaacggaaattccaacgtctgaccaagggggagcaaggtggcttgactctcgaagacaaagcgcattttatccaacggcaattagtagaaactcgtcaaattactaaaaatgttgcgggaatcctaaatcaacgctacaatgctaattcaaaagagaaaaaagtccaaatcatcaccttgaaagctagtttaacaagccaatttcgttcgatttttggcttgtataaagtccgtgaagtgaatgattatcaccatggacaagatgcttatttaaactgtgtggtcgcaaccacgttattaaaagtttatcctaatttagcaccagaatttgtttacggagaatatcctaagttccagacctttaaagaaaataaagccacggcgaaggctataatttatacaaatttgctgcgctttttcacggaagatgaaccacggttcacgaaggatggcgaaattctttggagtaacagttatttgaaaactatcaaaaaagaattaaattaccatcaaatgaatattgtcaaaaaagtagaagtgcaaaaaggcggtttttcaaaagagtcgattaaacccaaaggaccatcgaataaattgattcctgtcaaaaatggtttggatccccaaaaatatggcggttttgatagtcctgtggttgcttatacagtgttattcacgcatgaaaaaggtaaaaaacctcttattaaacaggagatactgggcattacgattatggaaaaaacaaggtttgaacaaaatcctattctttttttagaggagaaaggcttcctgcggcctcgtgtattaatgaaattgcctaagtatacactgtatgaatttccagaggggcgccggcgcttattagctagcgctaaagaagcgcaaaaagggaaccagatggttttacctgaacatttacttacattactgtaccatgcgaaacaatgtttgttaccaaatcaatcagaaagtttggcttatgtagaacaacatcaaccagaatttcaagagattttagagagagtggttgactttgctgaagtgcatacattagccaagtcaaaagtccagcaaattgtgaaactttttgaagcaaatcaaacagcagatgtgaaagagattgcggcatcctttatccaacttatgcagtttaatgcgatgggcgcaccaagtacgtttaaatttttccaaaaagatattgagcgagcacgctacacgtcaatcaaagaaatttttgatgccactatcatttaccaatcgactacgggactgtatgaaacacgcagaaaggttgtcgactag

SEQ ID NO: 86 - protein, 1380 aa, Prevotella histicola
MKKILGLDLGTTSIGWALVYESENADEKSSIVRLGVRVNPLSVDEKGNFEKGKSITTNADRQQTHGARINLQRYKLRRENLKDCLQKQGWIGTEALYEEGKTSTFETYMLRAKAAEEEISLHELCRVLFMLNKKRGYKSNRKANNKEDGKLFDGMTVAKKLYEEHLTPAEYSLKLLSSGKKFKQEYYRSDLKEEFDRIWNEQQKYYPEILTDDFKQQLQGKSKGNTSKIFLGKYGIYSADLKGLDRKLQPLKWRVEALKQKVDKEVLAFVISDLNGQIASTSGLLGAISDRSKELYFNKQTVGQYLWTSLKESPHVSIKNKPFYRQDYLDEFEKIWETQATYHKELTPELKQEIRDIIIFYQRPLKSKKGLISVCELEQRKVKVTIDGKEKEISIGPKVAPKSSPMFQEFRIWQNLNNILLIDKGNNSNRPLYEEERNLLYEELSVKEKLSKAEALKVLNKNGKQWDLNYKEIEGNRTQAVLYDCYNRIIGMTGHEECNFKKLKASDIRYNVKTIFKNLGFSTDILDFDSSLQGHELERQPSYQLWHLLYSYESDNSRTGNDALLRKLETAFSIPKEYAAVLSDVVFEDSYGNLSVKAMRNILPHLQAGLDYSQACEKAGYKHSRRSLTKNELDKKEYKEKLELLPKSSLHNPVVEKILNQMINVINAVIDEYGKPDEIRIELARELKIGAAERENMTRSINQGNAENKRIREILEKEFALSYISRNDIIKYKLYEELKSNGFKTLYSDTYISKDKLFSKDFDIEHIIPKARLFDDSLSNKTIEARDVNIAKSNKTAFDFISEKYDQQGIEAYKKKLDILLQDGSISKAKYNRLLMKEADIPSGFIDRDLRDTQYIAKKAYEILSDLVRNVTPTTGAVTSRLREDWQLVDVMKELNFEKYQKLGLVEVIEDRDGRKIKRIKDWTKRNDHRHHAMDALTIAFTKPSYIQYLNNLNARSDKNSSIYGIENKELHREDNKLRFNAPLPINEFRAEARRHLKSILVSVKAKNKVMTQNVNVIKTKHGVIKKVQLTPRGELHNATFYGTKKRPIIKMVKVGAALDEVTIKKVSSSFIREALLDRLHEYNGDAKKAFTGRNSIDKNPIYIDEEHKKTVPALVKTIEWEMYHPTRKMISPDLKIDKVIDKGIREILRTRLAKFNGDAQKAFSNLDENPIYKDEAKKITLKRVSLEGVSSVIPLHKLKDMGGKPVVGKDGKPVWGDYVQTSNNHHIAFYMDENGNLQDDVVTFFKAARRKSQGVPVIDKNYNHDKGWHFLFTMKQNEYFVFPNEATGFIPTEVDLMDEANYDMISPNLYRVQKMSKTKQGITDKRDYWFRHHLETVLNNDLKVRNSIFKQINSLKPLEGIVKVRINAIGKIVAIGEYD

SEQ ID NO: 87 - protein, 1403 aa, Chryseobacterium gallinarum
MVERILGLDLGVSSIGWALVEEDVKNPENNKIIKLGVRVNPLTIDEKTNFEKGKSITTNAGRTSARSARRNLQRFKLRRKKLLEILIHYKIIKNDAVLAETGKNTTFQTQYLRAKAAREKIELDELARVLLLINKKRGYKSSRKVQNDDDGKAIDGLSVAKELYEKNYTPGQYAYDLLKRGKKQIPDFYRSDLQNELDRIWEFQKQYHPDILTDEFKKELEGKGQRATAAIFLNRYKIYTADNKGTREEKKIQAYQWRVEALSQPLDVKEVAYVIAEINNNLNNSSGYLGAISDRSKKLYFNGQTIGEYLFEELSANPHTRLKNQVFYRQDYQDEFEKIWKIQTKFHPELTKELKEQVRDIVIFYQRKLKSQKGLISFCEFESREIEIEENGKRKRKKVGLKVAPKSSPLFQEFKIWQVLNNIEIKNEDERRYLEPEEKELLFNELNCKGNLTSQKCLELLGFKSKDAKLNFKVVEGNRTNEKLYDAFLKILELQGYNVFELLKIKEDKDEAKLSELKASADEIKGMIKEIFNANLINTSILDFNAELEGKDFENQASYQFWHLMYSYEGDNSPSGNEKLYELLEKKFGFKKEHSKILSTIVFSQEYGSLSTKAMRRIYPYIKDNKYSEACLLAGYNHSKHSLTKEELENRKLKEQLEVLPKNSLRNPVVEKILNQMINLVNATISEYGKLDGVRIELARELKKSAQEREDMAKSINEATLLHQKYATILKQEFGVVNPSRNDIIRYKLYMELTVNGYKDLYTNTKIEKENLFTDKYDIDHIIPQSRFFDDSFSNKVLVPRQSNLDKGNLTAYDFMSNKGSEREEHFLNVIKELLDKGSISKAKYEKLKKKGLEIGDGFIERDLRDTQYIAKKAKEILFEITNSVVTTSGRITDKLRKDWDLVNIMKELNLDNYRRLGLTEIVRNSKGEEKELIPDWTKRNDHRHHAMDALTVAFTTRNHIQYLNYLNARKDEKHKEHQNIYAIENIITEVIEKKNGSKTRRFKAPMNSFRHEAKQHLKEILVSHKTKNKVVTSNINKTKKKGGIHKKTELTPRGQLHKETVYGSKKFLQSREEKVSAKFDYETILMVVNPIHRNALLNRLKEYGNDPKKAFSGKNAINKNPVYLDDSKTDILSEKVTLSWYETGYTIRKSVTPDNFKDYKNLEKITDLGIKKILKERLDQFKGNAKEAFSNLDKDPIWLNEEKGIAIKTVTITGVSNAESLHFKKDHLGKEILDENGNKIPGDFVSTGNNHHLAIYLDEEEKLDDKMVTFYEAVLRVNQGLPVIDKDYNKEKGYKFLMTLKQNEMFVFPNEDFDPNEIDLLDERNLERISKHLFRVQKISKVGYGNSFVRDFVFRHHLETTVEERKELRNITYIQLKSLEGLRNIIKVRLNHLGKIVQIGEY

SEQ ID NO: 88 - protein, 1424 aa, Parabacteroides sp.
MKRILGLDLGTNSIGWALVNEAETDEEVSSIIRLGVRVNPLTVDETQNFEKGKSITTNAERTLKRSMRRNLQRYKLRRDALVEFLKELGFITDETILSEQGNRTTFETCRLRAKAAEEEISLEELSRVLLMINKKRGYKSSRKVKKEEDGVLIDGMEIAKKLYEEDLTPGQLCSQLLESGKKVLPDFYRSDLQEELDRIWSVQKQFHPDVFCDAAKEEIKGKNRSQTWAILANYFVWKEEVVGWNDREAKNETIEKECKLVGLKRTTKGYELKKENYRWRAQALTEQLGLEEIAVVLQEINGQINASSGYLGAISDRSKVLYFNHQTVGQYQMAELDKNPHASLRNMVFYRQDYLDEFDRIWEKQAEFHKELTAELKKEIRDMIIFYQRRLKSQKGLISFCEFERLEIVVEKDGKKQTKVIGCKVIPRSHPLFQEFKVWQTLNDIKVLGREKKRNALSASESRALYPEEKEILARELAIKENMKKADVLKLLFENPQELDLNFKQIDGNRTGFSLFSAYSKMIEKYGYEPLDFKKPADEIIGQLRTIFTDLGWNTNLFTIDLTKEGKELEMQPYFRLWHLLYSFEGDNTSTGNGKLIEKIMQLCGVEKEYAVELASLSFQDDYGSLSAKAIKRILPYLKEGNLYDVACEYAGYRHSKSSLTKEEIENKVLKGKLEVLPKNSLRNPVVEKILSQMVNVINTIIDTYGKPDEIRVELARELKKSAKEREELTKAIAKSTREHEEIRKLLQDEFGMMNVSRNDIIRYKLYEELKDNGYKTLYSNQYIPKEKIFSKEIDIEHIIPQSRLFDDSLSNKTLEYKAINIEKGNKTAYDFVKEKYGEEGLQQYINRCESLFNDKKAKLRKLKMEQKDIPDGFIDRDLRNTQYIAKKALAMLNEICRRVVATTGSITDQLREDWQLVDVMKELNLPKYEALGFVETYEDKDGRKIKRIKDWTKRNDHRHHAMDALTVAFTKDAFIQYFNNKNAAQDSGNRNHTNIIGIKTRYFDKGRALPPIPLEQFRIEAKQHLEKLLVSIKAKNKVVTVNVNRTKKRKGENTKIQQTPRGQLHLETVYGSHKQYVTKIEKVNASFDAAKIATVSKRAYRNALLKRLETFGNDPKKAFTGKNALEKNPLYADKYQTIRVPEKVQTVEFETIYTIRKPVDPALNVDKVVDVKVRAILERRLKEYGGDPKKAFVNFWENPIWLNKEKGISIKRVSIRGINNAQSIHVKKDKNGNPIWDENGKQIPVDFVNTGNNHHVAIYRKPVLDKKGQVTFDEDGNLMYELDEVVVPFFEAVTRANLGLPIIDKDYRKSEGWQFLFSMKQNEYFVFPNEKTGFNPKEVDLLNPDNYAMISPNLFRVQTMSKVMYGNNVVRDYKFRHHLETTVKDMKELKDIAYKQYKTLSFGNSVVKIRINHIGQIVSVGEY

SEQ ID NO: 89 - protein, 1430 aa, Capnocytophaga canis
MKHILGLDLGTNSIGWAYVKEAENDTETSEIVDLGVRVNPLTTDEKTNFEKGKPISTNADRTLKRSARRNLQRYKLRRKELIELLKEHQLISENTILTENGKGTTFQTLELRAKSAKEKISLGELARVFLTINKKRGYKSSRKAKNEDEGQLIDGMEIAKRLYEENLTTGQLSLQLLKEGKKSLPDYYRSDLQFELDKVWNFQKQFHSDILTDEFYAQLKGKGQRATSALFLAKYQIYTAENKGSREDKKLQAYQWRVDALSKELTREELAFVITEINNNLNNSSGYLGAISDRSKELYFNNETVGEYLWKQIAANPHTSLKNQVFYRQDYLDEFERIWNTQAQFYPQILTESLKKELRDVVIFYQRKLKSQKSLVSFCEFENKEIEIKKEDGTSTKKVIGLKVAPKSSPLFQEFKIWQNLNNVLIRKKGSKTKKVAKTQQAVLFEEEKTISELDLEAKQALFNELNLKGNLKADYCLEILGYSPKEWEMNYPELEGSRTNKALYEAYLKITDLEGYDAKNYLKVKLNKDEVELDDLKVPASEIKDMVQAIFKEAGINTDILHFNAELDGKDFENQASYQLWHLLYSYEGDDSKSGNELLYKLLETKFGFKKEYAQILANVSLSDDYGSLSTKAMRKIHPYIKENKFSTACELAGYRHSKHSLTKEENDNRVLRDSLEVLKKNSLRQPVVEKILNQMINLVNALLKKYRTETPNFKFDEIRIELARELKKNAEERANMTANINKAKTEHEKIIKILKNEFGLPNPTRNDIIRYRLYEELKANGYKDLYTNIKIPQEKLFTKEIDIEHIIPKSRIFDDSFSNKTLSFRKTNLDKGERTAFDYMESKFGADKLEEYVARVEDLYRNNIISKAKYQKLLKKESEIGDGFVERDLRETQYIAKKAKEILLQITRNVLSTSGGITDRLREDWDLVNVMKELNLPKYRALGLTEMEDRKYGQQVEVIIDWTKRNDHRHHAMDALTVAFTKHNHIQYLNYLNARKNEKHKEHSNIMGIQQLETIKVTDKNGNEKRVFKAPMPNFRQVAKAFLENVLISHKAKNKVVTKNKNKVAGSNKVQEVLTPRGQLHKETVYGKYQYYVQKEEKIGGKFDLETIKKVANPLYQSLLKKRLEENGGDPKKAFTGKNSLAKNPIYLDDAQTEQLPEKVKLVWLENSFSIRKDITPENFKDEKLIDKILDEGVKRILKERLQSFGNDAKKAFSDLDKNPIWLNKEKGIAIKRVTISGVANAEPLHTKKDHLGKEILDKEGKPIPVDFISTGSNHHVAVYRDEKGNLQEKVVSVFEAVVRANQGLPIIDKTYNQHLGWEFLFTMKQNEMFVFPNESTGFNPNDIDLLDPKNKRIISPNLFRVQTISVVKYGNAIVRDFKFRHHLETTVEDKKELQGKTYQQIKSLSPLNDIIKVRINHLGDIVSVGEY

SEQ ID NO: 90 - protein, 1535 aa, Ornithobacterium rhinotracheale
MNTILGLDLGTNSIGWALIKVLNDKTRLPLEIIDLGVVVIPTDQRTLDKFSKGESISKTAERTKQKGVRKLYERKKLRRERLHRVLNILGFLPEHYSKKIDFKKHLGQFFGNSQPKISYVENDHGKHEFIFMDSYREMLKEFSKHNIKNVPYDWTIYYLRKKALSQKISKEELAWVILNFNKKRGYYQFRDDNADENKENKIEKYYALKVTNVKKEDAQNYTITLENGWIYKNKSKISLLDWVGSTKEFISTEKFDNKGNIIKKKNGEDDRTLKLVDSEKDWIAIKKSTEDRIENYGKTVGTYLYEHLLKDPNQKLNGELINIIDRKFYKNELKQILEKQKEFHPELLNEDLFQKSIIELYPKNSTRQKELKNKDLCYLLIDDVIYYQRDLKKKNSTINKCSFESREYYLNGEKQIQKINCIAKSKPLYQEFRTLQFIKNLKVYEIIDGLEKDITSKLLPDFETKEHFFEWLNDKEKIDQLQLLSYKCFDLHDNVKNDLIAKGIKRPTEKAIRTELLEKYRWNYSKDNDRNFLLNETRFKILKYLKKVDKKLTLTNEQIESLWLLLYSAKDERELKNGLQKFSEKNKLPKKFSDIFISFPPFKKEYGAYSEKALKKLLSLVRFGKYWSFNKIDNNIQNKIMNILNGEVDDSISDRVREKTILLQDKNDFQDLPLWLASYVAYNRFSEVSEIKYWDSPDKIEFLKQHSIGNPIVEKIINETLKLIKDIWVIHGKSCKNFFSEIHIELSREIKSSSKKRAQITNNNTKNQKLNNLIKSLLIEMASDTKYENVTPYSPSQQEILKIYDEGIYSKEENSEKIKEINKIRNNNKISKSDITKYKLWLEQGYISPYTGKIIPLTKLFTAKYQKEHIIPQTKFFDDSFNNKVICEAEVNKLKDNSLAMNFIKAKGGKAVKLSDGETVTILNQEEYKQLVRTSFKKNSIKLRNLLLEEIPDTFTKRQLNDTKYISKLVLSLLSNIVREKGELESTAKRIVSTNGQITSILRNDWGLNNIWNKLITPRFERLNNINKNKIYGNWENKKGKNVFQINYLNDNLSTLNTKRIDHRHHALDALIVACTTRNHINFLNNQYAKSRNQRHDLRAKLKRRETITTEGSKKQVFKDFIKPWESFTQDALKKLETTIVNFKVNKRIINKTINWYKKWEKQKDGTYKKIQKKQTKGDAWAIRKPLHIDTIYGIVCKKLPLKSALENYKNIIDENLKHKIKELKEVNKFDNNQIINFFKECNFIFEDNNIQKVEVYDFKDNRDKTILSSSRQLIDESFTPKKIGKVLDPTIRNILLKHLNSTKYNNKFDSDGNPIKPEKLAFSPEGLKDLNKNIKHLNNNKEHQPIKRVKLFETLGNKIKVGYTQQKNKKFAETATGTNLFLGIYSDNNKRDFKTIPLILAIQREKEGLNPCPDTDEKGNQLLFSLSPNELVFVPNNEERKNPNLVDFENLSKDQIDRIYKFVSCTGSEAYFVPSRTAKPIIENENGTNNKSQRIIEFNEKTSIKNEKNEPVLIKTICWKIEVNRLGKIIKVIK

SEQ ID NO: 91 - protein, 1440 aa, Weeksella virosa
MKTILGLDLGTNSIGWALVEQDFENKQGLILGMGSRIIPMDAGIIGKFAEGSSISQTAERTGYRSIRRLRERHLLRRERLHRVLNILKFLPEHYAAEIDFEKRFGQFLAETEPKLAWKKNAEGKFEFLFQRSFDEMVADFKANGQDIKIPYDWTIYYLRKKALTQKISPQELAWIILNFNQKRGYYQLRGEEEEENPNKKVEFYSLKIVDVVADEQPNKKGDTWYSLHLENGWVYRRSSKIPLYDWKDKVRDFIVTTDINEDGSEKLDKDGEVKRSFRAPKEDDWTLIKKKTEQEIEQFNQTVGSYIYEALLDNPTQKIRGKLVRTIERKFYKSELKKILEKQIELQPELFTEDLYNACARELYRRNVAHQQQLSSRDFVYLFLNDIIFYQRPLRSQKSLISNCSLEFRTIKDKDGNGQIIYLKAIPKSNPYYQEFRVWQWLYNLKIFTKEDDKDVTNQFINKVEDLEALFEFLMNQKEVNHTDILTYLIEPIVKSKYPNAKGKAFKDELKKELKKYRWNYVYDADKDESKSYPMNETRYELRKRLDKVENVPADFMTRKIEQHLWHIIYSVTDKIEFEKALKSFANKYDLHQESFVENFKRFKPFDSDYGTYSEKAIKKLLPLMRVGKYWSWDIIDDKTKTRIGKIITGEYDETIKNRVREKAIDLTEENHFQGLQLWLAQYIVYDRHSEADIAGKWNSVADLEQYLSEFKQHSLRNPIVEQVITETLRVVRDIWKQYGKGAKDYFDEIHIELGREMKNTAEERKRLSSIISENETTNLRIRAILEELMYDENMENVRPYSPMQQEALKIYEDGVLSSSVEIPEDIEKISKKSEPTKSEIQRYKLWLEQKYRSPYTGRPIPLSKLFTPAYQIEHIIPQARFFDDGFSNKVICESEVNALKDKMLGLEFIQNYYGQKVTTSFGEVTILTEDAYKAFVKEHYDKNRSKRNKLLLEEIPEKMIDRQMNDTRYISKYISKVLSNLVRGEKDDEGVNSKNIIPGNGKITGILKQDWGLNDVWNDLILPRFERMNQLTNSTDFTAWNEKHQKFLPSVPLELSKGFQKKRIDHRHHALDALIIACATRDHVNLLNNKHAKSRNERYDLQHKLRHTTPWQDKEGKVRTKFTEFKKPWETFTQDTKKELEKIVVNFKQNLRVINKATNYYEKIVDGKKVMFKQEGVNWAIRKPMHKETVSGKIDLPRVKVSKGKILTATRKSLDTSFNAKTILSITDTGIQKILLNYLKAKGNPELAFSPEGIEEMNQNISLYNDGKPHQPILKVRVFEQGSKFPLGETGNKTTKYVEAAKGTNLFFGVYEDNQGKRSYDTIPLNIVIERQKQGLNSVPETNEKGHRLLFSLSPNDLVYVPIEGEVFDETNPDVNRIYKVVSFSGSQMFCVRQDVATSIVYKLEFSSLNKMERTIDGIMIKEICIKLKVDRLGNISKA

SEQ ID NO: 92 - protein, 1345 aa, Flavobacterium frigidarium
MKKILGLDLGTTSIGWSFINESENENETSSIVNTGVRIVPLTSDEEADFKKGNTISINADRTLKRGARRGLQRFKLRRDALLDIFSKINFIPTHYVYAENGSNSTFLSYQLRAKAAIEKVSKEELVQVLLMLNKKRGYKSSRKAKSADEGDAIDGMKIAKEIFENNLTPGQWVYNSLLKEGKFIPDFYRSDLQKELERIVRFQNQFHSEQMNEKLLEDIQGKTRTQTSQYFTNAIKIPLTENKGSRDEVKLQHYKWRSEALTSELDLKILAYVITEINNQINQSSGYLGAISDRSKELYFNQETVGQYQYKQLQENAHNKLKNQVFYRQDYLDEFEKIWKTQARFHPELTDKLKTEVCDITIFYQRKLKSQKHLVSFCEFEKGHKAIPKSSPLFQDFRIWQNLNNIVIKNETTKEPFVLDEDLKKIISEELLFKESMTDVQMMAFCDLKKGNHSANFKKIEGNRTNTEIFKAFEKILILEGYDELDFSKLDASDIKQIFKSAFVDLGISTAILHFDPKIQGNDFDKQGYYQFWHLLYAAEDDDKLKETLKNKYGFKENHLPYLLNINLQADYGSLSAKAIKKILPHLMDGHIYNKACLMSGYNHSSSLTTEQNNDRVLKDTLELLKKNSLRNPVVEKILNQMINVINAIIKDPEMGKPDEIRVELARELKANNEQRSDMTKAINKSTAEHDKIRQLLRTEFGIPRVTRNDIIRYKLWKETEGISIYTGKTIEASRLFTKDYDIEHIIPKSRLFDDSFSNKTICERQLNIDKSNKTAYSFLQEKLSAEDFDQFEKRVKSLFGKISRTKQNKLLMADNEIPEGFIDRQLRETQYIAKKAKEILFEVSRNVTATIGSVTDKLRDDWELVEVMKELNWKKYEKLGLTYEEKGKNGERLYKIKDWTKRNDHRHHAMDAITVAFTKPAYIKYLNTLNAQSKDDTKEIYSQYLKRDKNNKLRFIPPMENFREAAKKQLESILISYKAKNKVVTKNKNTTKKSGGTQTKIQLTPRGQLHKETVYGKLQRYETKEEKVNANFTAAHIAKVANKAYREALLKRLEENENDPKKAFTGKNSLAKTPIYISLKDNITVPEKVKLVWLEDNYTIRKDITPDNFKDLKSIAKVMDSGLKTILENRLAEYGNDPKKAFSNLDENPIWQNKEKGIAIKRVTISGVSNAQALHTKKDHLGNEILDQEGKPMPVDFVSTGNNHHVAIYRDEKGNLQEEVVSFYDAVIRRNLGLSVINKNHEKGWDFLFSMKQNEFFIFPSDSFNPHEMDLQNPTNYHLISRYIFRVQKIATKDYTFRHHLETTVEDKKELKDISSKRLGLNGINDIVKIRINHLGKIVQIGEY

SEQ ID NO: 93 - protein, 1213 aa, Rikenellaceae sp.
MEKRLGIDVGTNSLGWAIVEVDDEGCTLLDRGVDIFQEGVAREKNQEKPAVQDRTDARALRRHYFRRRLRKIALLRVLVRHDLCPALSEEQLNAWQGKGIYPLDDAFIRWQRTDDNADRNPYRDRFRCLTEELDLACREERYVLGRALYHLCQRRGFLSNRKDAGNEAEEGKVKQEIKTLSADMAAAGCEYLGEYFYRLYQRKEKIRKHYTARNEHYLAEFRAICRKQRLDEELRQALEKAIFYQRPLKSQKGLVGKCTFEKDKSRCPVSHPRFEEFRMLQFINNVRVTGPGDAEPRPLSPEEVEIVRPLFLRKSKPHFDFEDIAKKIAGKGNYACRGELLQAPYRFNCAGKSTVTGSPVSALFASVFGDDWQREICSLYTLGAGKNEEQILNDVWHVLFAFEDEERLQAWLQEKLQLSADDAKTLAAFRLPQGYASLSLNVINKILPYLRRGYRYDEAVFFANLGKVLPAEVYADPARRREVEQGISAQMDDLGDGEKTRKEERIRDYLRRYWGVEEKRLERLYHPSMIEAYPSASPNGQGLLQLGSPRIPAVRNPMAMRALFRLRVLLNELLREGKIDRGTKINIELARELNDANKRKAIERYQREREAENRKYAEEIRQQYVEATGHSIEPSEEDILKYRLWVEQGHCSLYTGKTIGISEFLGDGRRYDIEHTVPRSRGGEDAQYNKTLCEEEFNRDIKRDKLPSELANHTAILACVESCGWFERIEGLEHRVWGADRRAKSATTKSAKDFAIQDRHYWRMHLDYWRRKCEAFTMTEVPEGFSNRQGVDVGIIGRYARLYLQTVFDRVYTVKGATTAAFRRMWGLQEEYAAKERVNHVHHCIDAITIACIGSREYALWAQYVRQDELYRWGEADKPRCGKPWPTFTEDVRATADELLISHHTPDNMPKQSRKRLRVRGKVQRNDRGEVKYMQGDTARGALHQQTFYGAIERDGEIRYVVRKSLDQLLPADVEKIVDEAVRQKVREAVEAYGFKEATDPTKHTVWMNEEKQIPIRKVRILTGVKNPILLKPHRDVSVKEYKRYYHVVNDGNYCMAIYEGRDRQGRLKRTFEIVNKLEAARYFKRSADRESRPDLVPLSDVNGYSLKYLLKTGTMVLFYENSPDELYECSVGELAKRLYKVVGMAQDGRVQFLFHQEARDQKAVTAECGMGISVFDARHPAPKLRIRVSNFKMFVEGYDFELTVTGEVKFKR

SEQ ID NO: 94 - protein, 1459 aa, Jejuia pallidilutea
MSKLGLDLGSSSVGWAKNVGGKIVKSGVITFNTGMSKGQSGGYVSPTRERREARAKRNLIKSRKYRKWELLKVLAEMKFVPLDEQELQIWSKYKKGSTRRFPENEKFLKWLACDFTYEEGENYKNPYVLRVKALNHIVTKHEFGRALYHIVQRRGYKDIGETDKETENQIKRRNDDGFKKALDIHGTVAKALNEEFLKKGKRARNQYPLREEYKHELEELCKAQGYNIQKEGKEGYKNKFVKSLWKAIIWQQPLKTQRGNIGKCSLEPTKPRSPISHPIFEIFRSWQFINTIRYYDDDGEKQVLSQKIKQALFYEKFLKKDSNFKFEEIRKFLDKRFQKAKRYNYPIDRKTGKYDTSVSGMPVCKGLINVFGEKAQSALDDMELYQINNAPKIIDKYSIYDLWHIIFEFDAEHLDKFATEKLKIQNKIVTRKKKQISISPLVELKEKFIQGYADLSLKALCKIIPFLKKGHLYNDAVILAKIPELLDTQWQEKRDLINEVLEKSNKLYNERKAIINIANNLIDKHKGLNHSEKFAYKDFEYALVPDDIEEIEKACVGYFGEKSWIKNKKKEEIIKEVGFEYQDYFHDTKRAYRKFPNFTEIFKDDLKENGINLKGELYHHSNRKNIYDNTLEINHETGEKYLPTYKDTGIEILPVPYIDSIKNPMFNKSMSILRKLINELIVAGEVDDNTEIIVELARELNDNNKRAAIERYQNLRKNNREKYREFLKEFKNRENINLNVEESISAFELWSEQTFEETNDENGKRISNKGHIEILNEKAALKRYELWMEQKGQCMYTGKMISITQLFSNDIDIMHTIPRWLLPDNTMANMTVGFSKYNRDLQKEKLPKQCDNYSVDVDGWGTSIEPRLEIWKKERDKWKSLFESRRKPKGNEDEEKKNKRIQEKHYFKMHLIYWNDKIERFEADEVKDSWARRQLVDTQMISRYAREYLKLYFKKVSVQKGTVTSDFRKLFGFQEEDEIKSRDKHTHHAIDASVLTLIPVNSSKREQILKNYFKSQEDKDKLSLKKLRASVKPSSDFNPQELIRKIEEKTLIVNYQKDKIINQSIKKVRKRGKIQYVKDKQGEFVLDKEGNRIIKYAKGDTLRSELFAQTYLGKIKDVERYDDSSPKRNTENTDWIYKKGKDEFIFVKRENIDKVKSSDKLIKSIIDPVIRNLVEEQKKNTIVKDYQGNVIRHIRIRTKSGREVKERINYRSRYDYKNKFYSEAGKIPYAVLLQKSINGEIEREMIPVASFEVAKVFKKHRKFNPELYMNEFHPDIGNWDKKNWLKVGQKVIVLKNDKEFEKRDDIDFQHKRMYVITQFSDGGIWLQYHLNAQSKDDVKKSISLAKDKLLRKYEIQYNIPEVIEDESIQDRKNRTADYNNRRFRFDTISKSFRLTTLMETIGEKRTKKIKAELDKYKAIPSSIEIEGETALLKMSKENWNYLYEGTDFEVTILGKLNWL

SEQ ID NO: 95 - protein, 1442 aa, Caenispirillum salinarum
MPVLSPLSPNAAQGRRRWSLALDIGEGSIGWAVAEVDAEGRVLQLTGTGVTLFPSAWSNENGTYVAHGAADRAVRGQQQRHDSRRRRLAGLARLCAPVLERSPEDLKDLTRTPPKADPRAIFFLRADAARRPLDGPELFRVLHHMAAHRGIRLAELQEVDPPPESDADDAAPAATEDEDGTRRAAADERAFRRLMAEHMHRHGTQPTCGEIMAGRLRETPAGAQPVTRARDGLRVGGGVAVPTRALIEQEFDAIRAIQAPRHPDLPWDSLRRLVLDQAPIAVPPATPCLFLEELRRRGETFQGRTITREAIDRGLTVDPLIQALRIRETVGNLRLHERITEPDGRQRYVPRAMPELGLSHGELTAPERDTLVRALMHDPDGLAAKDGRIPYTRLRKLIGYDNSPVCFAQERDTSGGGITVNPTDPLMARWIDGWVDLPLKARSLYVRDVVARGADSAALARLLAEGAHGVPPVAAAAVPAATAAILESDIMQPGRYSVCPWAAEAILDAWANAPTEGFYDVTRGLFGFAPGEIVLEDLRRARGALLAHLPRTMAAARTPNRAAQQRGPLPAYESVIPSQLITSLRRAHKGRAADWSAADPEERNPFLRTWTGNAATDHILNQVRKTANEVITKYGNRRGWDPLPSRITVELAREAKHGVIRRNEIAKENRENEGRRKKESAALDTFCQDNTVSWQAGGLPKERAALRLRLAQRQEFFCPYCAERPKLRATDLFSPAETEIDHVIERRMGGDGPDNLVLAHKDCNNAKGKKTPHEHAGDLLDSPALAALWQGWRKENADRLKGKGHKARTPREDKDFMDRVGWRFEEDARAKAEENQERRGRRMLHDTARATRLARLYLAAAVMPEDPAEIGAPPVETPPSPEDPTGYTAIYRTISRVQPVNGSVTHMLRQRLLQRDKNRDYQTHHAEDACLLLLAGPAVVQAFNTEAAQHGADAPDDRPVDLMPTSDAYHQQRRARALGRVPLATVDAALADIVMPESDRQDPETGRVHWRLTRAGRGLKRRIDDLTRNCVILSRPRRPSETGTPGALHNATHYGRREITVDGRTDTVVTQRMNARDLVALLDNAKIVPAARLDAAAPGDTILKEICTEIADRHDRVVDPEGTHARRWISARLAALVPAHAEAVARDIAELADLDALADADRTPEQEARRSALRQSPYLGRAISAKKADGRARAREQEILTRALLDPHWGPRGLRHLIMREARAPSLVRIRANKTDAFGRPVPDAAVWVKTDGNAVSQLWRLTSVVTDDGRRIPLPKPIEKRIEISNLEYARLNGLDEGAGVTGNNAPPRPLRQDIDRLTPLWRDHGTAPGGYLGTAVGELEDKARSALRGKAMRQTLTDAGITAEAGWRLDSEGAVCDLEVAKGDTVKKDGKTYKVGVITQGIFGMPVDAAGSAPRTPEDCEKFEEQYGIKPWKAKGIPLA

SEQ ID NO: 96 - protein, 1458 aa, Salinispora pacifica
MPYTLGLDLGSSSLGWALVDEEQQNIIKTGVRVFPGAATDIGTGKESYKNQDRRLSRQARRQTLRRKQRRIVLLRTLVDFKMCPLSKDELESYAKYRKGKKQEFPSSSEFNSWLKLNPYELRDRALHEDISRFEFGRILYHIIHHRGFKTGRKSNEDGALYKGNEDTVGVDETKNLLQQYATLGEYLNSLRIKSDGNERLRGRYTLRNWYVDEFNKIWERQAGKLGLENETVHSRNKRYYGPAGSSEHRRKLQAYKKAGISFEIEGDFICREQTVSLKDYLGNPDKGILFYQKPLKSQKHLLSKCRYEKRKSVCQISHPEFEYYRAMQFANQIEYGAGEKLNETDRKDVIILLLSKDKAVKMSDLKKKIQKTGVQFNYADDHKVPGSPTTAFISKVTDTSNVENIDWELFHSIWNDLVFYDKSEKLKEKFQRSYNIDVSIEQLNKYKINTDYSSLSLKAVRNINPFLQMGMLYNDAVIFAGIRRVIGEKSFDANADEIISHVSKLKEKNNRDVNQSFTDALREYVMQTFNISMNQTYKLYHHSQEMSVQNNRYYLSELPNLRNPIVQQALQELRTLVNTLVEQYLPDGEQFSKIKVELARELKLPRDVRRRMHWENNQRAERNNDAKIELQKFGLSPSRENIQKYILYKEIQNSVQGQSVQCPYTGQSLAITDVFGNDNKVQVEHIIPYSISLDDSLSNKTLCIAEENGKKGEKTPYQFYKSDPDHWEVVKARAFTLLPYEKAKRFVSTRDYEPEAFLQRQLNDTRYISKAARDYLSTICDQVYVFPGSLTAKVRRMWGLNSILSPPIKTNFEGNAGMYWAVMNDDGVIIELSEQELPPPAIRASDILISGEMKNGIFKVDRKFTGQSQTREVSVEHRTYDSPGWMVYSLLSVEKYLPLFSKLPSQDTKSIWLKGRAQVKDRESPSLMLNSLPVKLMLPPGEYDDNAPYWVNIPVNGELRWEKRGEKPGKNELLIKRTKHRDGKVEAFIDKRKCLFDIPPQDNKSALIIPLDLQEILQVVRMFTPTPAIAEHQFLIKGKIDQSYRFTAESNFRIALDAPEGTPSGPAFAIANCEPRDMRFYPKKNIKPKNGKGKNVLSGFVFQEDGSLVFNPGKNRMDHRHHAIDALTIALLNTGQLRELSGYFLKIKKRQRYSAPKPQFPLPWDNFRADALNSINSILVVHRQNREIIKRIKKNTRLNGRTYVSQGMSVRGQLHKDTVYGKHYIPGSDEPGYHVRKQITDLTSLSKIADAGTHEILRTFVEENGYSIDEKEKVKGEWFTKGNDYQVIMPSSGKPGNPIKKVRIRENLGNAVQWHTGINQYVNPRNNYAFIIYRDSDGNYKEHPVTFWDAVQARLAGKSVYQLPEPGKIITTLHINDTFLLGLGDEQLQGDLPQELVSRHLYRVQKLSSMYYCFRLHTESTLDRDFEPYYLGIQSFKAWKEQNPLRVKVATTGEVNLE

SEQ ID NO: 97 - protein, 1070 aa, Sulfitobacter donghicola
MRLGLDIGSTSIGWWIYETTDGQITSVIDGGVRIFSDGRDPKSKGSLAVDRRVARAQRRRRDRYLRRKAALMKRMAEVGLMPSDPKQAKQLEALDPYELRARGLDETLELTELGRALFHLNQRRGFKSNRKTDAGDNESGKIIDATARLDWAMRDHRARTYGEFLHMRRQKADTPRTTPAVRTRLTIAARDGAEKEESGYDFYPDRQHLRDEFDALWEAQAEYHGVLTEDLRDEIGTIIFHQRPLKTPKVGKCLFTNEERVASAHPLNQRRILVETVNALRVAQLGEVARALTLEERDTILHALDNKAHTKSLSGMSIKLKALGKVIKLRSGQYFTLETANRDAIACDPVRASLSKPDRIGSYWSTLDHNAQWEVVNRIRAVQSDADHRELVAWLVSQHRLAAEHAEGAAYAPLPDGYSRLGITATKRILAALEANVIPYSKAVESCGWHHSDERTGEVLDRLPYYGEILDRHVIPGTYDDSDDDITRFGRITNPTVHIGLNQLRRLVNRIIEVHGKPDEIVVELARDLKLSQDQKADVERTIKKNTQAAIRRGEKLEEMGVPNTGGNRMVLRLWEDLNDDDVMKRFCPYTGQRISAGMLFDGSCDVDHILPFSRTLDDGFTNKTLCLKEANRKKRNYAPHEAAEKGLLDRDAMDSVAKYLPDNKAWRFAPDAIERFEGERDFTARALKDTQYLSRLARTYLDALYDGGDDKSHVWVVPGRLTEMLRRHWGLNGLEALADSDEKTVKRKNRTDHRHHAIDAAVVAATDRSLIQKISKIAASDEQAGAEDTLKSTPPPWDSFRDDIAAQLQNITVSHRADHGRTDSLAKGRGEDTTSGALHEATALGIIDETHVTVRIPIESLKSGHLIEGSRNGYIRDPYLRDQLTLATKNGSDKDFTTVLQKFFDRSKRYGGTRRVRIIKTLQDTARISVPHNAPIKAYKGGSNHAFEIWRLPNGKIESQVITTWEHHNLTEPKRPHPAAKRIIRLHKTDMVAIERDGKTVICFVQKTDPSNGAFLVPHFEANADGRKRKNEPVEWYQMSANSLIKADLRRVGVDEMGRVRDPGPPPIR

SEQ ID NO: 98 - protein, 1044 aa, Mucispirillum schaedleri
MAEKKFKYRLGLDLGTNSIGWCMLRLNKDNEPAAVIKSGVRIFHDGRNEKTKEPLAVVRRNARSIRRNLDRKISRRNHLLNTLVKYFLLPSNEIERKALAVLNPYELRSRAVNERLELFELGRLLMHLSKRRGFKSNRKVDKEDSSGKIKPAIERLKNKMQETNKKTAGEYLYSLMQNGKPVRARLGRIDGSNGYEIYLDRALIEEEYNLIMNEQKKHHKELTDDIINEIFNIIFYQRPLKKQIIGKCSLTGEDTKLKKAHVLAQDFILLQKVQDLRVFDDNQLEFRPLSNDEKDIIKRELRKKKEVSYENIRKLLKKYYENVKYGMFSHETLYKKLQGNKTNALMSDKEIIGDSWYSLSPEVQYDIIEELYSDKDNDELSKLYSEKFNLNESQINGLLNKAIYRLDSGYIRYGKTAVTNLNSIMDKDNLNLHDAREEAGYEKENKQDASEYLEYYGKVLPDSVVDPQIENPKNDEERYGKIANPTVHAALNQLRKLVNELIKLYGKPEQIVIELARDLKNSRKAKDVINKKIAENRKLNEEVDKTLQEYSEKYNTHIVKNKLNRDKVKLWRELGKDPLERKCIYTGEQINIAKLFSDEVQIEHIVPYSKTLDDSFNNKTLSMKQANYYKGNKTPYEAFKDSKDGYNYDDIIARAKLLNNDNKFKRFTKDAMDIYNRDGKDFIARQLSDTQYLSTRALIYLQSLYEKAHHSSIWTIPGQLTALIRNYLGLNTLISNDKNKNRNDHRHHAVDAFVVAVTSRSLLQKISYAASLQEDLDNRNVSSYRNKLLEKMPEPFPNYRKSLELAIDNIKTSHKADRSISGKLHEDTAYGIVENDDKYNVVTRWTVDKFKEQKHFETIRDNELKEIACSDKELFAKIVETRKIKSIRKLAKENPVIKIKDKSGRDYKAFAGGNNICVEIYEVDGVRKSEVIQLFDAAQKGFMPEWMKKYPNGKLLMRLFKGDVIGFIENRKYNYYTIKGISIADQNLKLLAINKAEGIFKKGLNILFDSNNKNSLNAKQFNISVTGIVTKKKTADVNFWKNRK

SEQ ID NO: 99 - protein, 1118 aa, Mesorhizobium sp.
MGTRYSFDIGTNSIGWAVWRTGRDPKGIFGEKDAPLELLGAGVRLFKDGRNPKDGQSLATMRRIPRQARKRRDRFVLRREALVAALIEAGLMPASEKERKALADLDPYQLRAAGLDKALAPHELGRAIFHLHQRRGFKSNRKTDRKSDDRDKGKIATASAALAKKFEDENARTFGEFLWRRHRDPDMKRQAVLKAHDPAKGKPDLRAAKLRQPTRIRLEGQGATALYEFYPTREMLCHEFDALWEAQARHHPMLLTREAGDKIRSILFRQRELKPPLIGLCTFEYAAGEKESRLPKALPSVQAREIYERLGHIRLSTGSGTDRPLKSSERDDLATALLHCGLTKIKVSKTKGLAFKTEFRKALRLGGEVRINFEEMGEEGLVDLRTNRLLVQDDHYGPRWRALSWSGKDAFVKKLLEATDDDKLVARLMTEDGLSAVQARNAASIPLPDGYSRLGPTANAAILQALIDSRDENGFVVTYDKAVRRAGERLGKDWHHSDERDGEILDALPYYGKVLQRHILPGMMDPADRKDEAKFYGRIMNPSVHIGLNQLRRLVNALIERFGPPDQIVVELARDLKMSAREKEQEQRRNRDNREANEKRTKKLVELGQDNNGENRARLKLYDEQQRAGNGVAHCPFTLDPIGITQLFSPEIEIEHVLPRSRTLDDSAANKVLCFRTINRIKRGKTPWEAFHADPKWPDIAANAEKLPPNKRWRFREDAMDVFEARTSGKMDKTTLEQMGLTTGFQARHLNETKHMSRLAKAYLGKICDPDAVYVTPGALTSLLRGKWGLNSILSDDNLKDRTDHRHHAIDAITIGAMTRSLLLELNTLAGKAEQSDYDDVVGKVPWPFDNFRDAVRSVVDRVVVSNKPEHGKQGALHEDTAYGIVGDEAEAEEIGNLVRRKLLVDLTPGEVDRIRDAGLRKAMQAAVAPSRDARGKVSDAKGFAAALDTFAKAQGMRRIRVGKEDMSAVTIHDRQTDKAYKAVAPGENHHVDVVQMRDGAWKGFAVTVFEANQKDFRPQWEREKLGGKLVMRLHKGDAVELESSGVRLVKFVQQIWMKSNLVLLTEHNEGGDLQKRHQDADDPFRWDFANIGKLKERGCVAVKVDELGRVTKRISNT

SEQ ID NO: 100 - protein, 1082 aa, Neisseria meningitidis
MAAFKPNPINYILGLDIGIASVGWAMVEIDEEENPIRLIDLGVRVFERAEVPKTGDSLAMARRLARSVRRLTRRRAHRLLRARRLLKREGVLQAADFDENGLIKSLPNTPWQLRAAALDRKLTPLEWSAVLLHLIKHRGYLSQRKNEGETADKELGALLKGVANNAHALQTGDFRTPAELALNKFEKESGHIRNQRGDYSHTFSRKDLQAELILLFEKQKEFGNPHVSGGLKEGIETLLMTQRPALSGDAVQKMLGHCTFEPAEPKAAKNTYTAERFIWLTKLNNLRILEQGSERPLTDTERATLMDEPYRKSKLTYAQARKLLGLEDTAFFKGLRYGKDNAEASTLMEMKAYHAISRALEKEGLKDKKSPLNLSSELQDEIGTAFSLFKTDEDITGRLKDRVQPEILEALLKHISFDKFVQISLKALRRIVPLMEQGKRYDEACAEIYGDHYGKKNTEEKIYLPPIPADEIRNPVVLRALSQARKVINGVVRRYGSPARIHIETAREVGKSFKDRKEIEKRQEENRKDREKAAAKFREYFPNFVGEPKSKDILKLRLYEQQHGKCLYSGKEINLVRLNEKGYVEIDHALPFSRTWDDSFNNKVLVLGSENQNKGNQTPYEYFNGKDNSREWQEFKARVETSRFPRSKKQRILLQKFDEDGFKECNLNDTRYVNRFLCQFVADHILLTGKGKRRVFASNGQITNLLRGFWGLRKVRAENDRHHALDAVVVACSTVAMQQKITRFVRYKEMNAFDGKTIDKETGKVLHQKTHFPQPWEFFAQEVMIRVFGKPDGKPEFEEADTPEKLRTLLAEKLSSRPEAVHEYVTPLFVSRAPNRKMSGAHKDTLRSAKRFVKHNEKISVKRVWLTEIKLADLENMVNYKNGREIELYEALKARLEAYGGNAKQAFDPKDNPFYKKGGQLVKAVRVEKTQESGVLLNKKNAYTIADNGDMVRVDVFCKVDKKGKNQYFIVPIYAWQVAENILPDIDCKGYRIDDSYTFCFSLHKYDLIAFQKDEKSKVEFAYYINCDSSNGRFYLAWHDKGSKEQQFRISTQNLVLIQKYQVNELGKEIRPCRLKKRPPVR

SEQ ID NO: 101 - protein, 1087 aa, Geobacillus sp.
MRYKIGLDIGITSVGWAVINLDIPRIEDLGVRIFDRAENPQTGESLALPRRLARSARRRLRRRKHRLERIRRLLIREGVLTKEELDKLFEEKHEIDVWQLRVEALDRKLNNDELVRVLLHLAKRRGFKSNRQSERSNKENSTMLKHIEENRAILSGYRTVGEMIVKDPKFALHKRNKGENYTNTIARDDLEREIRLIFSKQREFGNMSCTEEFENEYIAIWASQRPVASKDDIEKKVGFCTFEPKEKRAPKATYTFQSFIAWEHINKLRLISPSGTRGLTDEERRLLYEQAFQKNKITYHDIRTLLHLPDDTYFKGIVYDWGESLKQNENIRFLELDAYHQIRKAIDKVYGKGKSSSFLPIDFDTFGYALTLFKDDADIRSYLRNEYEQNGKRIANLANKVYDNELIEELLNLSFTKFGHLSLKALRNILPYMEQGEVYSSACEKAGYTFTGPKKKQKTVLLPTIPPIVNPVVMRALTQARKVVNAIIKKYGSPVSIHIELARDLSQTFDERRKTKREQDENRKRNETAIRQLMEYGLTLNPTGLDIVKFKLWSEQNGRCAYSLQPIEIERLLEPGYVEVDHVIPYSRSLDDSYTNKVLVLTKENREKGNRIPAEYLGVGTERWQQFETFVLTNKQFSKKKRDRLLRLHYDENEEMEFKSRNLNDTRYISRFFANFIREHLKFAESDDKQKVYTVNGRVTSHLRSRWDFNKNREESDLHHAVDAAIVACTTPSDIAKVTAFYQRREQNKELAKKTEPQFPQPWPHFADELRARLSKHPKESIKALNLGNYDDQKLESLQPVFVSRMPKRSVTGAAHQETLRRYIGIDERSGKIQTVVKTKLSEIKLDASGHFPMYGKESDPRTYEAIRQRLLEHNNDPKKAFQEPLYKPKKNGEPGPIIRTVKIIDTKNQVIPLNDGKTVAYNSNIVRIDVFEKDGKYYCVPVYTMDIMKGVLPNKAIEPNKPYSEWKEMTEDYTFRFSLYPNDLIRIELPREKTVKTAAGEEINIKDMFVYYKTIDSANGGLELISHDNSFSLRGVGSRTLKRFEKYQVDVLGNIYKVRGEKRVGLASSAHSKTGETIRPLQSTRD

SEQ ID NO: 102 - protein, 1074 aa, Bacillus okhensis
MTDTRDYRIGLDIGTNSIGWAIIELEYNGEQYDKKGLIDAGVRMFDKAEIPKTGASLAEPRRLARSTRRRLNRRADRKKSIRRLIVEQDILNEAELQVLYQEKELLDIWTIRVEALDRRLSRTEWARLLIQLAQRRGYRSARKSEENDKETGVVLQNIRENKKLIDGYRTVGEMWVKDPRFQGRRHNSRSEYVFNVTREMLEEEIRTLFHTQRELGLSFASKEMEESYLSIWGKQLPFASGKDILKRVGFCTLEEQERRFPKATFTFQYFMVLDKLNRLRIKPSMRPLTEEERKSTLHYLFDRDDLSKKKTPPKVMYKEIRKQLNLAATETFNELTYDPNESMTKNENVLFVNLDAYYRIKQQCDLHNERYGPRDYDALGYALTVYKTDKDIRQYLRNKTNLANRIYSEELISNLLSQSYATFGHISKKALLAILPSMEKGDTFKVAADKMGYDTTGLQLVKKELLLPVIPNDITNPVVMRALTQARKVVNAIIKRLGEQPLSIHIELARDLLKGHDERRKISNEYKQNHKRNAGAYTILNENGIINPRGYDIVRYKLWQEQKQKCAYSGKVIPSETFFGELKKERGQGAPTLDVDHIIPYSKCFNDSYSNKVLVYSDENRKKGNHLPFDYLKESPSRWEEFETYVLTNEFPRAKRERLLKKQFSEDEESVMKERHLNDTRYASRYFKQFVEKSLQFKKSKNQFHKKRVETVAGRVTAHFRQRWGFEKHREGTHLHHALDAIVVACTDAAMIQALSLYHKQKEEGKKGYIKRFPLPWITFRDDVLNKLSESAIPEQIYSALVSGTTLPSYMLVSRMPRRSVTGPVHKETISKDGGVDEKGKTLIVKKVQLQDIKFNKNGDFLMYMEETDPATYKAIKERYLSFNKDAKKAFQDPLYKPSKKGKPNQIKSVKVIVEKKAHVRKVNGGVAENGDLIRIDFFQKEGKFFMVPLYTYDTIQSDLPNRYVVSGKGYQLWPQLTNEHKFIQSVHPYELLRVVKRSGDDRFLYLASINISNNVLKFIEPNFPHNDYIEISLGTIKHMEKYDVNVLGQVSLKATGPRLGFNNMKAQKNKVKG

SEQ ID NO: 103 - protein, 1049 aa, Tistrella mobilis
MINERLTFGIDLGIGSCGWAVLRHADAAGEPGVIEGLGSWCFDVPETSKERIPTNQVRRSNRLLRRVIRRRRNRMAEIRRLFHAQGLLPSADEDALKRPRLDPWELRARGLDQCLSAEEFAVALGHIARHRGFRSSAKRKAANTSGEDSKMLSALLVTRERTARYRTVGEMFARDPEYSARRRNRDGIFDRTVARDDLIHEVGKLFEAQRARGSAFASPDLEADFNAIAFRQAEMQDSERLVGNCPFERDEKRAARWAPSFERFRLLTRLINLRIATAEGERRFTPEDLARVSAELGATAKLPVSRVRALIGLLPDERFTTIRVEDEDRDIVARTGEAAPGTWRLRKTLGEALWAEMQARPDQLDAIAHVLSFFEATAKIRSELDRLGLPAAVIEALDRGLEDGAFAKFKGAGHISAKACRNLLPHLQQGHRYDQACRLAGYDHAASTLSHTAQVVSKAGFNALVTELGESIANPIARKALTEGLKQIRAMCARWGLPGAIHIELAREVGNSIEKRRELESQRETTTKRRQTERDEIRGLLALEDVDDDTLLRYRLWKEQGGKCLYTGKDIHVRQLIATDNSVQVDHILPWSRFGDDSFNNKTLCLASANQRKRGQTPWEWFSLTGTPEAWEVFASRVETSKDLRGFKKRNLLLKNADEVAQRFRSRNLNDTRYAARLLAEAAKLFYPAGDRQEKDGRRRVLTRPGPLTAALRHAWGLESLKKADGKRVSDDRHHALDALAVAAISEREVQRLTRSFQEWEQQGLARPLRHVAPPWPGFRGDVLAAYAQAFVARPERRRARGKGHDASIRQVVGEGPEAQVFERRGLADLKEADLDRVKDPERNQAIIEAVRAWILAGRPADAPPRSPRGDVIVKLRTAPAKKIKPAVPVRGGTADRGDMVRIDVFTRPNRKGRDEWYLVPIYPHQVMNRKAWPHPPMRSVVAYKDEAGWTEIGAEHSFRFSLYPRSYVQLVKSNGDVIEGYLVSMDRSTGAFRVFVHNNPAEMAKGIGAKTLLNLRKFNVDRFGVRTEVKSEVRTWHGEVCTSPVPPD

SEQ ID NO: 104 - protein, 1060 aa, Kingella kingae
MAAKSLNYILGLDLGIASCGWAVVEMDEQENPLRLIDVGVRTFEEAENPKDGSSLAETRRLARAQRRLISRRANRMNKLCRLLKQENVLQANDYDEKGLIIGLPNQAWELRAQGLDRKLEPKEWAAVLIHLVKHRGYLSQRKNESQTADKELGALLSGMNHNHQLLQSQSNQYRTPAELAIKQFATQDGHIRNQRGAYTHTFNRLDLQNELNQLFDAQTRLGNPHVSGSLKTAINDLLMNQKAALSGDAILEMLGRCTFEPSEYKAAKNTYSAERFVWLGKLTNLRIQDNGLESALSREQRELLLNEPYNKTKLTYQQVRKLLRLPETAFFKGLRYGKDNAESATFMEMKSYHAIRKSLENKSLKSEWEKLKTQPKLLDLIGTAFSIYKTDDEIAGCLKNQLPENVIIALQGQLNFSNFMELSLKALEKLLPLMEQGLRYDEACTQIYGNRHEKIADKTEKFLPNIPADKLRNPVVLRTLTQARKVINAIIRRYGSPARVHIETGREVGKSFSDRDKLKKQQEENQEQRRRAIDEWKQFFPNAAHEPKAVDILKLRLYQLQQGKCLYSGLPIDVRRLPEKGYVEIDHALPFSRTWDDSFNNKILVLASENQNKGNQTPYEYLRGADNSESWRLFVENVQNCQFSPNKKQKIMAKQLDEKGFLERNLNDTRYVSRFLCQFISEHLHLTGKGKKRVFASNGQITALLRGRWGLSKNREENDRHHAVDAVVVACSTVAMQQKITQFVRYQKGNVFTGERIDKETGEVISIHFPTPWEHFREEVMIRVFDDNPLRTLPEKLPNRPEALHEYVMPLFVSRMPTRKMTGQGHKETIKSAKRLDEKISVLRVPLTQLKLNDLENMVNREREPALYEALKARLEQFKNDPAKAFAEPFFKQGGQQVKAVRVEIVQKSGMLLRKINGVADNGSMVRVDVFEKSGKFYLVPIYAWQVAEGILPNYAVVAHKDESDWILMDESYHFKFALYKNDLLEVQTKKGGIMGYFASLDRATGAITIREHDRDKKKCKDGEHRSIGVKMASSFKKLQVDELGKNIHETRSRKRPNIG

SEQ ID NO: 105 - protein, 1065 aa, Clostridium perfringens
MNKDINYALGLDIGITSVGWAVINLDLNRIEDLGVRIFNAAENLKDGSSLALPRRLARGRRRLLRRKAYRVERVRKLILKNNILTKEELEGLFKNKEVIDVWEARVKGLDYKLSREEWAKILINFCKRRGFKSNRKNEAKDKEAGQILSSISYNIEKMKETNSRTIGEYIYNEVKNSEDSYAPLRNKFGEYKMCVSRDVIREEIHTLFEKQRELGNNFASDEIEDKYFEIFNSQRPFSNFEDLEKLVGFCTFERKKHKRAPKHCISSEEFTLYEGINKLSIIKDGEKRKLSEEERTLVVNEAFNKKEIKYTTLRKLLGLSEEELFSTLTYSIDKDISKTENTKFVSLKGYHEIKRAIEKGVSKKAWQDIENNRNLLNDIAYVLTLGKTDDEIEKQLRLRNVPEELFESLLDMSFNKFNNLSIYALEKILPFMKEGYQYNEACEKAGYNFKAIYEGVRTKKLPVIEIDEIVNPVVNRALAQTRKVINSVIDKYGSPVRINIELARDLAKNFKDRKLIEKEQKENRANLDKIRENLRELMDKEPTVVEVLKYRLWEQQRGECAYTQSQIPLERLFSPGYCEIDHIIPFSRSFDDSLSNKILVLGSENQRKGNRTPYEYFGEDSERWNSFEIWVKGSYLNYKKKANLLKKKFSEEEQRDWKARNLQDTKYICRYISNFVNNRLEFKESENKQKVITVNGRATAYLRSRWGLNKVREDGDKHHALDAAVVGVTTQGMVQKISKYSKAHELYTVRKNDEFVDVETGECVDVDEYKEIRKDILPRPWRGFSEELKLRLSDNPLEELKKSPIETYNEEFIKENVKPIFVSRVPFRKISGKLFKETIYSERAFKDGYFVSKKSLVDLKRGDLDNFYNYECDKKLYDAISERMKEFNYNGKKAFESPFRKPTKSGKEGPVVRSVKIKSAVPFKDGIPMNEGLVAKEGMVRIDIYEKEGKYFVVPVYRYQLAKGIVPKRAAIAKKDELKWPIMDQTYNFKFSIYKNDLIEVKYDKKGVYFGYYDGFDRNSASLTIEKHDNSERYRSIGLKVGVLEINKYEVDVLGNYHKVKLGGN

SEQ ID NO: 106 - protein, 1069 aa, Neisseria sp.
MKKQPQRYILGLDLGIASVGWALILVDGAENPVGLLDCGVRTFERAEVPKTGDSLALARRQARSVRRLIRRRAHRLLRLRRLLKREGILSAADFNSDGLPNLPIDAWQLRVAGLERKLTNQEWAAVLLHLVKHRGYLSQRKSETQTENKELGRLLAGVAENSKLLSESSEQYRTPAELAVKLFAEQSGRLRNKGGDYTHTFNRLDLQKELHLLFERQCALGNPFASAELQSKVDELLMTQRSALQGEAVLKMLGKCTFEPSEYKAAKNTYSAERFIWLTKLNNLRILYNGEDRALDEGERKQLLDEPYKKAKLTYKQVRSILNLPESAVFKGLRYGKDSDGLKAENGALMEMKAYHKIRTVLEKAGLKGEWENRIRNPEILDQIGTAFSVYKTDEDIKAELAALRLPENVLDALLAGLNFDKFIQLSLKALSNILPLMERGIRYDEACKEVYGDHRALAESKNQMLLPQIPANEIRNPVVLRTLTQARKVINAIIRRYGSPQRVHIETARELGKSFKDRKEIEKRQEENRKERERAAEHFKELFPRFTGEPKSGDILKLRLYQQQQGKCLYSGIPIDLGRLNEKGYVEIDHALPFSRTWDDSFNNKVLVLGSENQKKRNQTPYEYLDGARDSQRWREFQARVQGCRFPYAKKQRIQTAKLDSKTEQGFLERNLNDTRYIARFLCGFIEKSLHLQGAGKRRVFASNGQITALLRGLWGLKKVREDNDRHHALDAIVVACSTVSMQQKITKAMQRRETLETINTETGEVKTRIPQPWDFFRQEVMIRVFSDAPREELAEKLNSRPEALHDFVSPLFVSRAPNRKMTGQGHLETVKSAKRLSENISVVKKPLTALKLKDIENIVGYPDREPALYRALQERLQAYKDDPAKAFAEPFYKPAKDGGQGSLVKAVRIIENTKHGLKVRNGITDTNGDMVRADVYQKADKKGKRQYFIVPVYAWQVEKNELPTVDCKGYEIDDTYEFCFSLYKYDIIEIQNPDNMSKELRVYYINCDSSDGRFWLAHHDKSAKEQQFRISTQNQPIIKKYQVDPLGKEIRLCKAEKRTELNGKKKK

SEQ ID NO: 107 - protein, 1001 aa, Campylobacter coli
MKILGFDIGINSIGWAFVEDNQLQDCGVRLFTKAEDPKTRESLALPRRNARSNRRRLGRRRSRLIALKHIISKELKLNYQDYIANNGELPKAYEGRLISPYELRYKALNEKIEPKDLARVILHIAKHRGYMNKNEKKSSDNEKGKILSALKTNALKLEKYQSVGEYFYKEFFQKYRENTKDFINIRNKEGSYENCVLASDLEKELKLILEKQKEWGYSYNDNFIKEILKVAFFQRPLKDFSYLVGACTFFEDEKRACKNSYSAWEFVALTKIINELKSLEKESGELVSSQIINEILNHVLDKGSITYKKFREYIKLHESMKFKSLKYDKDNVESTKLIEFRKLVEFKKALGEHSLSREELDQIATYITLIKDNEKLKITLEKYSLNNEQIKNLLEIDFNDHINLSFKALNLILPLMKEGKRYDEACKLLNLKTKSNNQKFDFLPAFCDSIFAQELTNPIVNRAISEYRKVLNALLKKYGKMHKIHIELARDIGLSKKLRAKIEKEQKENYENNIWALNECENFGLKANAKNILKLKLWKEQKEFCIYSGKKISIEHLRDEKALEVDHIYPYSRSFDDSFLNKVLVFTKENQEKLNKTPFEAFGANEERWSKIQALAQNLPYKKKNKILDEAFKGKQQQDFISRNLNDTRYISTLIVKYTKEYLDFLPLDEKEDINLKSGEKGSKIHVQTINGMLTSVLRHTWGFAQKDRNNHLHHALDATIVAYSTNAIIKAFSDFKKEQELLKAKLYAKELTNDSYKHQAKFFEPFEGFREQILNQINKLFVSKPPRKRARGALHKETFYPKDEMIKKYNSQEGVEIALNCGKIRKIGTKYVENDTMVRIDIFKKQNKFYAIPIYTMDFALGVLPNKIVIAGKDKKGNPKQWQEIDESYEFCFSLHKDDLVLIQKKDMQEPEFAYYNSFDIGNSSICVEKHDNKFENLTDNQKLLFVNAKEGSVKAEKLGIQGLKIFEKYIITPLGEKIKADFKPREDIALKTSKKHGIR

SEQ ID NO: 108 - protein, 1048 aa, Sulfurospirillum sp.
MVEKILGIDLGISSLGWAVVEYDKDNDENNKIIDCGVRLFTAAETPKEKESPNKARRDARGLRRVIKRRRVRMNTIKNLLITYKLIDKTLLDEEMGMFHSQSNRVDVWKLRHDALYHLLSGDELARVLIHIAKHRGYKFLGDDESDEESGKVKKAGAELKKKFLEAGCQSVGEWLWKERGLQGKKRNKSGDYEISIPRDFLVEEIQRIFETQQKFGSTFATSELQKAYTDIAFYVKPMQSIEDMVGYCTFYPKIKSKNQDGEKRAPKASPSAEQFVILSKIFSTIVIDENKQEKKLIELKSIEQLIQIARSKETLKYKQLRKELNLAKDISFKSISDEEKTWINLVGNAKFKKILGLNYETFLKNTEISDEIAKILTYDKTFEQKETKLKNLLVNIDWIDNNHIAELAKLSFSQFNQLSLKAIKIISKIMIEGYARYDEAVQYAFENNLLPKPSHEKSILLPPLKETNIAILNPTVIRAFAQFRQVANALVSKYGSFDKVHFELAREVNTKEDRKRWEKDRDKNEKMHRQITEKLVEEGVKPSYKNILKSKLRSEQKDTCPYCQKNLHYPMIFEDGYAEIDHILPLSQSQDDSYVNKVLVHSACNQNKKNRTPFEWFQDEKKDWDTFKSYILMESTLGEKKRNYLIKENFSDPQSRKEFISRNLNDTRYMSKAIKTYCENHWKLSHDDDKLRIQVRSGKLTSTLRHQWGLDNKNRETHTHHAMDAIMIAFSTQGMVKKLSDYFAKKEAKVEKDKPVLITPIKQFKEAVEQATTLERQESIQTKAGDTITLNRLLISRPPRASVTGAAHEQTAKPYPRIKPIKNKYKRRRIPIDEDKFELFRNDKVASGNDKNFYNSSTIPRVDIYKKDDKYHVVPIYLSDMTKAEVPNKSLGTNPEGMDEKYFCFSVFKNDLIELETKATPKKPSKKLLGYFKQLNGANFILNSIHNGIIDGFVCSPITLFKQQKDMCKKCLPEDRAIGNCSQETLEFWEAENIKVPKKDFECDQGIKFAIAVRKYTIDPLGYYHEVKGEKLLGTIPQGAKKHPKRQK

SEQ ID NO: 109 - protein, 1115 aa, Dechloromonas denitrificans
MSATYTIGLDIGIASVGWCAFGETHILDLGVRAFDKAETAKEGESLNLARRNARLMRRRLFRRTWRLKKLARQLKSEGLIADTKLFKPELPFSKSLWQLRVDGLDRRLNDEEWARVIYHLCKHRGFHWISRAEAKQAEGDSKSEGGKVKQGLAGTAKLMDEKGYRSAAEMVLAEFPQAQRNKQGEYQKALSRELLAKELALLFAQQREYGNLHTPGALETAILGNGDKKSGLFWQQKPALAGTDLLKMLGTCTFEKGEYRAPKASFTAERHVWLTRLNNLRIVTDGVTRQLTEQERQLCLPLPYRQAGDLTYKQLGSALAKAGLLEAGGFKFTGLAYPTEAQKAEGKAKDPESATLVKIPAWHELRQTLTKGGLNDEWEKLAGDALCGQPEIFDKIAWVLSVYKDDDEVRAELAKLALPNPQALTEALLNIRFDKFHSLSLKALRAIVPHMEQGLRYDEACVQAGYHHSQLLKVGEGEHKYLPPLYDGRDGDGRMIFAEDADIPRNPVVLRSLNQARKVVNAIIRRYGSPSAVHIEMARDLSRPFDERNKIKKDQDEYQARNQRDREQFSELFGHPPKGLEFEKWRLYREQNGQCAYSQRPLTASGNVAEIFLDGSTEIDHALPYSRSFDDSKNNKVLVLTRENRDKGNRTPYEYLGGAENSESWQRFVSFVESNKAYRLAKRTRLLRKDFGAKESEEFRERNLNDTRYVCRFFKNYVEQHLKLAEGSETKRCVVVSGQLTNFLRARWGLLKVRSDSDRHHALDAAVVAACSHSMVQRLSNYSRTRELEQVRDGFVDIETGEIVNPAMHQQLREHFPDPWPYFRHELEARLKIDSPELLREEMARLGSYSEEELKVLKPLFVSRAPQRRNGGAAHKDTIYGQPEKLKKNGSVTQKVALTSLTLKDIDLLADPHRNAKLYGAIRERLEAHGGKGDKAFPATNPLRKPDKEGNPTGPIVRTVTKVIDKLSGIPVRGGIAKNDTMLRVDVFTKGGKFHLVPVYVHHRVTGLPNRAIIAFKDEDEWTLIDDSFDWCFSLYPNDLLRIKLKKESHSGYYSSCNRSTGAVNLWAHDRNVNVGKDGFIESIGVKMAVSIEKLHVDTLGNIYPAPPEKRRGLA

SEQ ID NO: 110 - protein, 1137 aa, Nitratifractor salsuginis
MEDRIVKKILGVDLGITSFGYAILQETGKDLYRCLDNSVVMRNNPYDEKSGESSQSIRSTQKSMRRLIEKRKKRIRCVAQTMERYGILDYSETMKINDPKNNPIKNRWQLRAVDAWKRPLSPQELFAIFAHMAKHRGYKSIATEDLIYELELELGLNDPEKESEKKADERRQVYNALRHLEELRKKYGGETIAQTIHRAVEAGDLRSYRNHDDYEKMIRREDIEEEIEKVLLRQAELGALGLPEEQVSELIDELKACITDQEMPTIDESLFGKCTFYKDELAAPAYSYLYDLYRLYKKLADLNIDGYEVTQEDREKVIEWVEKKIAQGKNLKKITHKDLRKILGLAPEQKIFGVEDERIVKGKKEPRTFVPFFFLADIAKFKELFASIQKHPDALQIFRELAEILQRSKTPQEALDRLRALMAGKGIDTDDRELLELFKNKRSGTRELSHRYILEALPLFLEGYDEKEVQRILGFDDREDYSRYPKSLRHLHLREGNLFEKEENPINNHAVKSLASWALGLIADLSWRYGPFDEIILETTRDALPEKIRKEIDKAMREREKALDKIIGKYKKEFPSIDKRLARKIQLWERQKGLDLYSGKVINLSQLLDGSADIEHIVPQSLGGLSTDYNTIVTLKSVNAAKGNRLPGDWLAGNPDYRERIGMLSEKGLIDWKKRKNLLAQSLDEIYTENTHSKGIRATSYLEALVAQVLKRYYPFPDPELRKNGIGVRMIPGKVTSKTRSLLGIKSKSRETNFHHAEDALILSTLTRGWQNRLHRMLRDNYGKSEAELKELWKKYMPHIEGLTLADYIDEAFRRFMSKGEESLFYRDMFDTIRSISYWVDKKPLSASSHKETVYSSRHEVPTLRKNILEAFDSLNVIKDRHKLTTEEFMKRYDKEIRQKLWLHRIGNTNDESYRAVEERATQIAQILTRYQLMDAQNDKEIDEKFQQALKELITSPIEVTGKLLRKMRFVYDKLNAMQIDRGLVETDKNMLGIHISKGPNEKLIFRRMDVNNAHELQKERSGILCYLNEMLFIFNKKGLIHYGCLRSYLEKGQGSKYIALFNPRFPANPKAQPSKFTSDSKIKQVGIGSATGIIKAHLDLDGHVRSYEVFGTLPEGSIEWFKEESGYGRVEDDPHH

SEQ ID NO: 111 - protein, 1134 aa, Enterococcus cecorum
MKYIESVSIGFDIGVGSVGYAVINSKTKQILESGVSIFPAAVAQKNVERRESRQSRRLRRRRVNRLNDLKKLLKKNGFIPSPNKNPYEIRVRGLEHQLSRDEIAIAVLHIAKRRGISYSLDDVVDENVTDFKGKIAKNQEALKNKTPGEIQYERLLKYGKVRGTVTNYVEYDEQPEYFLNVFPNSAYVDEAKRILTCQKQYYPEITDDLIENIVKIISRKRAYYIGPGNEKSRTDYGIYRTNGETLENIFEILIGKDSVNPDELRAPANSLTAQVYNLLNDLTNIRYNGSERLTPEQKQDILSELLTTEKTVQMLNVIAKKVNVKKEEISGFRTKKDDKPDFHTLEVYRKVRKHMLNKGIDINEWPTECFDELAFIFNLNTEIGEIRNRISEKVVPKYDFITNQIVDDLLEDPKIFAISTSQKWHRFSIKTMNVLIPELLNGYNEQMTILTRMGLLEDSKNDYSNIDKIDIKNVTENIYNPVVRKSIKKCLKIFNELYKKYPNISDVVIELPREDNPEDARKLIKKMQKENLVEKDTSLEAFRKEANLSENGLIDFLRKGKNRALKIRLWYQQEGKCLYTGEPILAEDLCKNEANYDIDHIIPISVSFDDSINNKVLCSSHFNRFEKEKKTPFEYFSNKSSHLGRYSNFDEFRASVNANKRISDVKRKNLLSKELLSDLDTRKKFIARNLVDTRYASRVVFNELTQFFASKKADTKVAVIRGKFTSQLRRAWQLNKSRDTYHHHAVDAALIGVTPFLKIWRSGKTIYPRKMTEAQTDFELNEITTNDEFKESYYQLPCPQFLDYLTQMQENLKINFEVDKKMNRKISDAMIYSSRKKKLSKDKKEKEYSLGTINDIYSDAGYSKFKNIYKKDKEKFLMYHLDHKSFEILEDIISQYPDKEEYIDSEGKVKQRAVSPFEIYRRKYGYIRKYSKKNNGPIIKNMKYYNENLPKIYIDITPKQSIDKKVYLTNISPWRTDVYYNRSQNSYHIMGIKYSDLRYIDGKYGIPKNVYEKIKLREKIPSESEFCFSLYKNDRVKIIDPNKNEEIELRFNSRTLPSVLNYVEFKPLFQESYNSLTLLPVFSKTTSEGRIIKKFTREDNIVYKVNTDELGNPYYILKESQNPKNIIDNSNKTE

SEQ ID NO: 112 - protein, 1142 aa, Facklamia hominis
MYSVGLDIGIASCGYSIINDVNGNIVELGTLLFKSRNSDNNEERRTNRGSRRLINRRRTRLDDGKKLLAEKGFKQDSKLKHVCPYELRVKGLHEKLTQGEIYKVVLHILKKRGISYLDESDENSSGIDGASYKDQVNLNLNLQKELTPGQIQLKRLKENGRIKSGVTFENGYQLNVFSVSAYANELNKILTKQSEYYSEIDQIWIDRFTKNGYRKEAGLVYRKRPYYDGPGNEKNNSIYGRWANFKEDGHPKENIFDQLIGLDSVDSTQVRASASTLTAQKYNLLNDLNNLTIIEDDRKFTTDEKVSIINYLMTQDITRFGPKELAKFYQLEVDQIRGWRIDNKGNPEIHSLKVYRDWKKIFNTSSIDLTSIQTWVVDELANVITLNTEIPSTLATLKIKIPDIDQQILNFVENNFYELKKKTSKNSWHSFSLKTLNILIPELLNTSEEQNTILERLNLKFDLKNKYAEKNQIPVKELLEQIYNPTVTKSVHQSIKLFNEIIEKYGKNNISYVTIEMPRDKNDQDQKDTIKRINKLNSERKNDSEKYFLERSGWDTIRFESALKKPRFAEKLLFYYEQKGKCAYSGQDILAESLLNESCEVDHIIPLSISFDDSIHNKVLVTASSNQEKGQRTPYMAFIDGAKLGQSWDDFVAWVNSCGFHRKKVQNLLYEENIFNPDVQRGFVSRNLNDTRYASRIVLNAIQSFFYKQKDLTKVKVVNGSFTHTLRKKWGSSLDKNRDTYHHHAVDATLCAVTPFINIVKYEFFEEDGIKYMVDLTTGEKVAYSDYKKMKFYDKRAYVPIWDGFIKQLTPANLYPKIKFSHQVDSKWNRKISDATIYSTRKIVETKINKKGVAKETVKDIVIDKIKDIYTPEGWRKFKEKQDKLLMKNFDEKTYNKLIKIAKEYPEKKEVQTSNGKVSLVEVSPFKMYCEEQNVPAIRKYSKKGNGPYIRSLKFYDKELGKHINITKDSYGNDIERTIRNKKIILKNQNSWRTDVYYNSVNNCYELLGIKYCHLKFYRGKYGIPKSIYDELKKEDEISSESVFKFSLYRHDRVRFEKDGEYIEALFGSKNESNKNYLELSPIDKNKWLSKENVKFFGEVAASGRFIKGLKPGIKVIKQSTDYMGHVYAIHQEKLKFVLSDA

SEQ ID NO: 113 - protein, 1122 aa, Streptococcus sinensis
MNGKILGLDIGVASVGVGILDKKTGEIIHASSRIFPAATADSNVERRGFRQGRRLGRRKKHRKVRLADLFSDTGLITDFSKVSINLNPYELRIKGLNEKLTNEELFIALKNIVKRRGISYLDDANEDGESSSSEYGKAVEENRKLLADKTPGQIQLERFEKYGQVRGDFTIEENGEKHRLLNVFSTSAYKKEAERILTKQQDYNQDITDEFIQAYLTILTGKRKYYHGPGNEKSRTDYGRFRTDGTTLDNIFGILIGKCTFYPEEYRAAKASYTAQEFNLLNDLNNLTVPTETKKLSEEQKRQIIEYAKGAKTLGAATLLKYIAKLVDGSVEDIKGYRIDKSEKPEMHTFDIYRKMQTLETVDVEKLSREVLDELAHILTLNTEREGIEEAIKVSFIKREFEQDQIAELVSFRKSNSSLFGKGWHNFSIKLMTELIPELYETSEEQMTILTRLGKQKTKARSKRTKYIDEKELTDEIYNPVVAKSVRQAIKIINLATKKYGVFDNIVIEMARENNEEDAKKDYVKRQKANEDEKNAAMEKAAHQYNGKKELPDNVFHGHKELATKIRLWHQQGEKCLYTGKNIPISDLIHNQYKYEIDHILPLSLSFDDSLANKVLVLATANQEKGQRTPFQALDSMDDAWSYREFKAYVRGARALSNKKKDYLLNEEDINKIEVKQKFIERNLVDTRYSSRVVLNALQDFYKLNDFDTKISVVRGQFTSQLRRKWRIDKSRETYHHHAVDALIIAASSQLRLWKKQGNPLISYKENQFVDSETGEIISLTDDEYKELVFRAPYDHFVDTVSSKKFEDRILFSYQVDSKYNRKISDATIYSTRKAKLGKDKSEETYVLGKIKDIYTQTGYDAFIKLYKKDKSKFLMYHKDPITFEKVIEEILKTYPDKEINEKGKEVACNPFEKYRQENGPLRKYSKKGKGPEIKSLKYYDNKLGNHIDITPDNSENQVILQSLKPWRTDVYFNHKTKIYELMGLKYSDLSFEKGSGKYRISLDKYNVIKKKEGVHKESEFKFTLYKNDLILIKDLEKSEQQLFRYNSRNDTSKHYVELKPYDKAKFEGNQPLMALFGNVAKGGQCLKGLNKANISIYKVQTDVLGNKRFIKKEGDAPKLEF

SEQ ID NO: 114 - protein, 1091 aa, unidentified
  source 1..1091: note = eubacterium dolichum
MGRLVLGLDIGITSVGFGIIDLDESEIVDYGVRLFKEGTAAENETRRTKRGGRRLKRRRVTRREDMLHLLKQAGIISTSFHPLNNPYDVRVKGLNERLNGEELATALLHLCKHRGSSVETIEDDEAKAKEAGETKKVLSMNDQLLKSGKYVCEIQKERLRTNGHIRGHENNFKTRAYVDEAFQILSHQDLSNELKSAIITIISRKRMYYDGPGGPLSPTPYGRYTYFGQKEPIDLIEKMRGKCSLFPNEPRAPKLAYSAELFNLLNDLNNLSIEGEKLTSEQKAMILKIVHEKGKITPKQLAKEVGVSLEQIRGFRIDTKGSPLLSELTGYKMIREVLEKSNDEHLEDHVFYDEIAEILTKTKDIEGRKKQISELSSDLNEESVHQLAGLTKFTAYHSLSFKALRLINEEMLKTELNQMQSITLFGLKQNNELSVKGMKNIQADDTAILSPVAKRAQRETFKVVNRLREIYGEFDSIVVEMAREKNSEEQRKAIRERQKFFEMRNKQVADIIGDDRKINAKLREKLVLYQEQDGKTAYSLEPIDLKLLIDDPNAYEVDHIIPISISLDDSITNKVLVTHRENQEKGNLTPISAFVKGRFTKGSLAQYKAYCLKLKEKNIKTNKGYRKKVEQYLLNENDIYKYDIQKEFINRNLVDTSYASRVVLNTLTTYFKQNEIPTKVFTVKGSLTNAFRRKINLKKDRDEDYGHHAIDALIIASMPKMRLLSTIFSRYKIEDIYDESTGEVFSSGDDSMYYDDRYFAFIASLKAIKVRKFSHKIDTKPNRSVADETIYSTRVIDGKEKVVKKYKDIYDPKFTALAEDILNNAYQEKYLMALHDPQTFDQIVKVVNYYFEEMSKSEKYFTKDKKGRIKISGMNPLSLYRDEHGMLKKYSKKGDGPAITQMKYFDGVLGNHIDISAHYQVRDKKVVLQQISPYRTDFYYSKENGYKFVTIRYKDVRWSEKKKKYVIDQQDYAMKKAEKKIDDTYEFQFSMHRDELIGITKAEGEALIYPDETWHNFNFFFHAGETPEILKFTATNNDKSNKIEVKPIHCYCKMRLMPTISKKIVRIDKYATDVVGNLYKVKKNTLKFEFD

SEQ ID NO: 115 - protein, 1130 aa, Streptococcus macedonicus
MTNGKILGLDIGIASVGVGIIEAKTGKVVHANSRLFSAANAENNAERRGFRGSRRLNRRKKHRVKRVRDLFEKYGIVTDFRNLNLNPYELRVKGLTEQLTNEELFAALRTISKRRGISYLDDAEDDSTGSTDYAKSIDENRRLLKTKTPGQIQLERLEKYGQLRGNFTVYDENGEAHRLINVFSTSDYEKEARKILETQADYNKKITAEFIDDYVEILTQKRKYYHGPGNEKSRTDYGRFRTDGTTLENIFGILIGKCSFYPDEYRASKASYTAQEYNFLNDLNNLKVPTETGKLSTEQKEALVEFAKSTATLGPAKLLKEIAKILDCKVDEIKGYREDDKGKPDLHTFEPYRKLKFNLDSVNIDYLSREVLDKLAGILTLNTEREGIEDAIKRNLPNQFTEEQISEIINVRKSQSTAFNKGWHSFSAKLMNELIPELYATSDEQMTILTRLEKFKVKKKSSKNIKTIDEKEITDEIYNPVVAKSVRQTIKIINAAVKKYGDFDKIVIEMPRDKNADDEKKFINKRNKENKKEKDDALKRAAYLYNGTDKLPDEVFHGNKQLETKIRLWYQQGERCLYSGKPIPIQELVHNSNNFEIDHILPLSLSFDDSLANKVLVYSWTNQEKGQKTPYQVIDSMDAAWSFREMKEYVLKQKGLGKKKRDYLLTTENIDKIEVKKKFIERNLVDTRYASRVVLNSLQSALRELGKDTKVSVVRGQFTSQLRRKWKIDKSRETYHHHAVDALIIAASSQLKLWEKQDNPMFVDYGNNQVVDKQTGEILSVSDNEYKELVFQPPYQGFVNTISSKGFEDEILFSYQVDSKYNRKVSDATIYSTRKAKIGKDKKEETYVLGKIKDIYSQNGFDTFVKKYNKDKTQFLMYQKDPLTWENVIEVILGDYPTTKKSEDGKNDVKCNPFEEYRRENGLICKYSKKGKGTPIKSLKYYDKKLGNCIDITPEESRNKVILQSINPWRADVYFNPETLKYELMGLKYSDLSFEKGTGNYHISQEKYDAIKEKEGIGKKSEFKFTLYRNDLILIKDIASGEQEIYRFLSRTMPNVNHYVELKPYDKEKFDNVQELVEALGEADKVGRCIKGLNKPNISIYKVRTDVLGNKYFVKKEGDKPKLDFKNNKK

SEQ ID NO: 116 - protein, 1107 aa, Turicibacter sp.
MGYTLGLDIGIASVGFGLIDNVDGKILESGVRLFSSADPDNNQTRRSSRQARRLNRRKVHRLERVAHLLEEAGFEKGEVLAPTPYHLRVKGLTEKLSKPEVYAALYNLMKHRGISYLEDVELDEADSSSVSQNVELLKEYYPCEIQLERYEEYGQIRGIIETYNKDGEKESLVNIFPTGAYKKEAEAIILKQGQFYPELDKVFLEKFTEILTVKRPYYVGPGNKKSRTDYGIYRENGETLENLFDILIGKCTIYPQEARAAKFSYTAQLFDFLNDMNNISIAGEKLTEVQKREIYHQIMSSKTVNMMKIITKVTGCLKEEVTGYRVDSKYKAEFHSFASYRQFRNKMLDYGFDVQTLNVEMFDKLAAKLTLNTEYHQIITQLESLNLGLSKELIEKIADFRKKNRSLFSKWHSLSLKAMNEVVDELWSTSKNQMQIFSELGGFKSNIEVFKGLKYIPLDAMVDEIYNPVVRCSIRESIKIINALLKKYGALDKVVIEMPRDSNEKEEKDRITKLNKENDNKKKQAIEKARNEYGFGEEAYRQQNDLNTKLRLWYEQKQRCLYSGEIIKIFDLIKNPHLFDIDHIIPKSISYDDSLSNKVLCYATENREKGNLTPYRYFKRKASLTWNYEAYKSYVIELYKDGKGDLSRTKLELLLFEEDINKYEVRQRFINRNLVDTRYASKVVLNTLQDFMKENYPTTTVEVVRGKFTAQLRRHWGIRKNRDENHAHHAIDALIIACVPHLSLWKEQKKVFSTDEFRVDETTGEIIEQSYNQLTYQEPFSQFFYQLEKVSIDCRYSYKVDRKFNRQVADATIYSTRQGIVKQTSGDKSFTLDSNSKEHYVIAKIKNIYEDVDAKRFMDRYKKDKTQFLMYHHDPQTFSILEDVMKTYPDKKNPFQAYRLEYGPIRKYSKKGNGPQIQSIKYYDSKLGQHIELKQANQSTKKVVLQSLNPWRCDIYYNKKDKRYIAAGLKYADLSYQKGTGLYGISLQRYQQILNSEKIELSIEQIELLLEGRLNESNFEFCFSLYKNDFIQWNDENNQTFQYRFLARNLSSPNRIEVKPINKSKYDKQAEGLKTLKKGLNRFYKISVDVLGYQHFIKKEKLKLTFK

SEQ ID NO: 117 - protein, 1064 aa, Bacillus niameyensis
MEKLRRVLGLDIGVSSVGWGIIDQDSGDVIDAGVRLFEEAARNANEDRRSFRSSRRLKRRRTHRLERAKSLFEYNGLPSESIGKMDPYQARYNAIFGEVSKEELVAGLYHLVKRRGTTLDSPEDEKSSGNELSTKEQLSRNRKFLENRYICEVQLERLSNGHEKIRNHENRFRTEDYVKEARAILIRQQQRYSEITDEFIEDFINILKSKREYFDGPGSEKSPTPYGQYYLDKDGKLAYTSMINKMRGICTYFPDHLRIAKMSYTADLYNLLSGDLNKLLINGEYLTYEDKLYLIDHFIKKGKNITLTQILKYKGISDDSDVSGYRIDLKTDKPIFTEFTGFKELKKIVDKNDLPSSILEDIDLIDDIIEILTAEKSYYRREEQLKPLFSEYDQETIDRIVNAFKESTSFKGYHALSKKAIELILEDLWYTNKNQMELFAERKLEEKRLSDLKTQTKVMFDGDAILSTVAKRAHREAIKIVNEVRKRYGEMDAIVIETAREKNSEEKRKQYSDFQREIGKHEKEMAKLLGVKSLKDLRLNSKQHLALKLWVSQDRKCIYSGRSISINDIVQDPSKFEIDHILPVSLSFDDSQANKVLCYHRENQKKGQKTPFQYFSTGQASRSFDQFKVEVLNLYKSRKINNKKKDYLLEIRDIAHNEELQKEFINRNLVDTQYAMRSFSMSLRTFFNSHNIDTKVLSIRGSFTAAFRRRARLNKDREESHAHHAIDALIVAAIGRMPIFEFLKEFDMSEEGVVVNRETGEILEENEFFKHKYLSFIRNLMNYESKVKYSHKVDRKVNRTMSNQTIYGTREKDGDTYYLGKVSNIYNLDKHGVEPLLKRLEKSPNSFLIAEHNPKLFELIQLIVKEYKNADNPFKAYYNDHGYVMKDGKVPVKTLRYRDRKLGVHMKITDKYPGAKSDVVLLSIKGVRVDLYKNAEGKYKYLGVPYHWFKQQGNKYVLDMEKYNEEKMKDYKKIDDTFEFQMSLYKNDLFSFERKEGSYFRIFRGDAMPRDNKIEVDFIDKKKQDRKDGFLSPSTFKNIVKYNVDVLGNTYKVEKENFKNTLQL

SEQ ID NO: 118 - protein, 1063 aa, Massilibacterium senegalense
MLENYILGLDIGIGSVGYGLIDENQNIIDAGVRLFPEADVNNNNGRREKRGARRLKRRKQHRVARVKHLLVKNRIMAEDAQPISNKPYEIRVKGLSKELTDEELAIALIHIAKRRGIHNVETTLDEQKDDNELSTKEQISKNEKLLRNKFVCELQLQRLTRNKENEIPYKVRGYQNRFKTSDYIKEVQQILNTQRQYNKKITDEFIERYIELIKKRREYFEGPGEGSEYGWGGDPRKWYEQLMGKCSYFPEELRAVKASYSAQLFNALNDLNNIVIMREENTKLSAEEKRRLIEKVFKIRKKPTLKQIAKEVGVNFEDIKGYRVNAKGEPIFTSFDFYHSIKTITQRHEIIENDKILDQMARILTVMQTPSEKRERLKQEIPELTTSEISEISELRFTSTHSLSLKLIYLLLPELWSTTKNHMQILSEMKLKPKRISLKGRNQIPVSIVDEWILSPVVKRAFTQSIRIVNAIIKRYGEPSEIVIELARERNSEDRKKFLSKLNRKNAAMNEEVKEKIEQLGVYDTKGLFEMIKLWHLQDGHCMYSLTPIPLNDLFLNPNHYEIDHIIPRSISFDDSINNKVLVKYIENQKKGNLTPYQYMNRKIDGVSYDKFKQHVLQLAKSSDKMSRKKREYLLEERDINKFEVQKEFINRNLVDTRYVTRELMNLLKTFFSENNKNVKIKSINGSFTHYLRKLWRFKKDRNIDYKHHAEDALIIAMAGYLFSKKEVLAKQNLILSDPHIVNKETGEILSEDDFTKTFIDKYEKVATIKKYQNYKYSHRVDQKPNRQLMNDTICSTRTVDNNEYVIKKIKDIYAKDNTDLVNKIRKSPKKLLMYHNDRQTYEKIKSIMEQYGDAKNPLYKYKEETGEFVTKYSKKDNGPPILSVKYYSGKLGEHKDITHKFHNSKKRVVNLSIKPFRMDVYKEDGIYKFVTVRFNDLKEKGDNYEICKKIYEEKLKKKKINNKSNFLFSLNKYDIFELDNEEFLFIGVNHDKTNRIECNWINQNYKNFAELNNLKNKQLRKSISKNIIQFEKFATDVLGNRYKVTNEKLIFSYPKKSMRGVR

SEQ ID NO: 119 - protein, 1309 aa, Kurthia huakuii
MNYSIGLDIGTTSVGWACINEQHEILRYQNKWAIGVREFEAAQTAETTRQKRQTRRRYNRRKKRIQLVQQLFSAYVPTDFFGATDSLHFWKNDNQFEQRTLSQVLKELRINPKKIPTIYHLRKLLMEGPKQDIRLIYLAIHNLIKYRGHFLNTGRWTKQNQGFNFLVECSDIVTAYSEINGLALPSLDFQAIQSIIEDTDMVRKDKQKQLEKVSSKSFVPLWQLLLGLSVNAEKLFVESQNTILYKEAKLKLVLGSEELDEVRENLTEVENHFIDEAFALYQQIMLQDLLQGHECVAASKVASYEKYQEDLCEFKRLINETKDEALYRRLFITPKKAMAEYKEQPNKDNKEKLCLLDRYNRSSKDKEAVLNTMAKLLATSNVNHHADLIENIKEGTFLAHQKGTHNAAIPNQNSIYEIEQILTNQQSYYSFITDEFINKVIEIASFRIPYYIGPLAKNNQSKFAWLERINNEGHITPATFDSLVNESITAEQFIKRMINKCTYLQEEDVLPKQSLLYQYFEVLNELNSIQIRPANAASHTKYRLPIEAKKCVIEFGFRQYKVMTHKRLIQVLKEQQFEYLIGEDYEVFGTQQEGRFASSLKSYVEFKSLFKNSAVPFDEVMIEQLIEWLTIFNEKTIIKKKIKEQYPKFPDVMIERVLKKNFVGWGNLSKKLLDELILNDGKTVIEKMCDSTLNFREMLTVKNSNLEELIKKNNRSKRQTKKIKYKDVQDLAGSPALKRGIWQAIKVVEELTEIFGEPQHIMLEVAREEGTKQRTQSRLMKFKAVVDGLGKDEKSLKNELNSYLNEPEAKFKDNRFYLYLLQQGKCAYSGKPLDVQHLAQYEIDHIYPQNFVKDDSLDNLVLVEKSRNQQKGGFKMPLEILNAAEGARMRGIWKSWLDKGFMNDKKFHRLCKAAFSELDRDQFIARQLVETRQIIKNVGVLLEERFSETTVHLVKAPIVSKFRKALELPKLRNLNNKHHAMDALLNALLINHAIQQYGENIFAFSFKDKERSSKLAKAAQQKNGFFLFNSFLSEQIKGPRSRKTLSAIAYVEEIYYELPWQTTKKIGNSDEMFFDETLHSPKIKPAKYESNKTNLSVHDSVKSSAVIVVKLMEQTKKQIVEKIDLIQLSVLEDKQWQHLSNDEKALKLASRKYSTKKIIAATWIMKLSKYQKFMWNNQMFYLASMKERHLATQFIVPKELLMAYLQANEQTSVAKLQTIYATIAEEMFKQYPIYREGNMPKKVAEFTKDIQNFEQMTKQVTEIFKATANNATRSDSLGSRLSKVMKAAEIKVVYESITGLKVRKPKELY

SEQ ID NO: 120 - protein, 1375 aa, Streptococcus equinus
MEKSYSIGLDIGTNSVGWSVITDDYKVPAKKMKVLGNTDKKYIKKNLLGALLFDSGETAEATRLKRTARRRYTRRKNRLRYLQEIFGKEMAKVDESFFQRLEESFLTDDDKTFDSHPIFGNKAEEDAYHQEFPTIYHLRKHLADSPEQADLRLVYLALAHMIKFRGHFLIEGQLDAENTDVQKLFNDFVEVYDRTLDDSHLSEITVDASSILTEKFSKSRRLENLIKHYPTEKKNTLFGNLVALALGLQPNFKTSFKLSEDAKLQFSKDTYEEDLEELLGKIGDEYADLFTSAKNLYDAILLSGILTVADNTTKAPLSASMIKRYNEHQVDLKKLKEFIKNNASDKYDEIFNDKDKNGYAGYIENGVKQDEFYKYLKTTLSKIDGSDYFLDKIEREDFLRKQRTFDNGSIPHQIHLQEMRAILRRQGEYYPFLKENQAKIEKILTFRIPYYVGPLARKNSRFAWAKYHSDEPITPWNFDEVVDKEKSAEKFITRMTLNDLYLPEEKVLPKHSHVYETFAVYNELTKIKYVNEQGKSFFFDANMKQEIFDHVFKENRKVTKAKLLSYLNNEFEEFRINDLIGLDKDSKSFNASLGTYHDLKKILDKSFLDDKTNEQIIEDIVLTLTLFEDRDMIHERLQKYSDIFTSQQLKKLERRHYTGWGRLSYKLINGIRNKENNKTILDFLIDDGHANRNFMQLINDDSLSFKTIIQEAQVIGDVDDIEAVVHDLPGSPAIKKGILQSVKIVDELVKVMGHNPQNIVIEMARENQITGYGRNKSNQRLKRLQDSLKEFGSDILSKKKPSYVDSKVENSHLQNDRLFLYYIQNGKDMYTGEELDIDHLSDYDIDHIIPQAFIKDNSIDNRVLTSSAKNRGKSDDVPSIEIVRNRKSYWYKLYKSGLISKCKFDNLTKAERGGLTETDKAGFIKRQLVETRQITKHVAQILDARFNTKRDENDKVIRDVKVITLKSSLVSQFRKEFKFYKVREINDYHHAHDAYLNAVVGTALLKKYPKLAPEFVYGEYKKYDVRKLVAKSSDNHSELGKATAKYFFYSNLMNFFKTEVKYADGRVFERPDIETNADGEVVWNKQRDFDIVRKVLSYPQVNIVKKVEEQTVGQNGGLFDNNILAKPEKDDKKKLFPIKNSLSTTSYGGYARATIAYSILIVSESRERKELKLLGLPLLDKVKYEKNPTAYLNGIGIVNIKNIFKLSKYCLLEFKEKSITYHRYMVSNQELKRANQLSLTCKETELIYTYIKSGEDNIQLDGNEKVILSLWNKMIAFMEQTKLIDKKLFVSLKELKDEVNLINILDIASKSIDFTKISAGQKKIVLNDSLSLPIKRWQFKSDEKMLKQLNDATLIHQSVTGLYETRIDLSKLGEE

SEQ ID NO: 121 - protein, 1348 aa, Streptococcus equi
MKKPYTIALDIGTNSVGWVVVTDDYRVPTKKMKVLGNTERKTIKKNLIGALLFDSGDTAEGTRLKRTARRRYTRRKNRLRYLKEIFTEEMAKVDDGFFQRLEDSFYVLEDKEGNKHPIFANLADEVAYHKKYPTIYHLRKELVDNPQKADLRLIYLAVAHIIKFRGHFLIEGTLSSKNNNLQKSFDHLVDTYNLLFEEQRLLTEGINAKELLSAALSKSKRLENLISLIPGQKKTGIFGNIIALSLGLTPNFKANFGLSKDVKLQLAKDTYADDLDSLLAQIGDQYADLFLAAKNLSDAILLSDILTESDEITRAPLSASMVKRYREHHKDLVTLKTLIKDQLPEKYQEIFLDKTKNGYAGYIEGQVSQEEFYKYLKPILARLDGSEPLLLKIDREDFLRKQRTFDNGSIPHQIHLEELHAILRRQEVFYPFLKDNRKKIESLLTFRIPYYVGPLARGHSRFAWVKRKFDGAIRPWNFEEIVDEEASAQIFIEKMTKNDLYLPNEKVLPKHSLLYETFTVYNELTKVKYATEGMTRPQFLSADQKQAIVDLLFKTNRKVTVKQLKENYFKKIECWDSVEITGVEDSFNASLGTYHDLLKIIQDKDFLDNPDNQKIIEDIILTLTLFEDKKMISKRLDQYAHLFDKVVLNKLERHHYTGWGRLSGKLINGIRDKQSGKTILDFLKADGFANRNFMQLIHDSELSFIDEIAKAQVIGKTEYSKDLVGNLAGSPAIKKGISQTIKIVDELVKIMGYLPQQIVIEMARENQTTAQGIKNARQRMRKLEETAKKLGSNILKEHPVDNSQLQNDKRYLYYLQNGKDMYTGDDLDIDYLSSYDIDHIIPQSFIKNNSIDNKVLTSQGANRGKLDNVPSEAIVRKMKGYWQSLLRAGAISKQKFDNLTKAERGGLTQVDKAGFIQRQLVETRQITKHVAQILDSRFNTEFDDHNKRIRKVHIITLKSKLVSDFRKEFGLYKIRDINHYHHAHDAYLNAVVAKAILGKYPQLAPEFVYGDYPKYNSFKERQKATQKMLFYSNILKFFKDQESLHVNSDGEEIWNANKHLPIIKNVLSIPQVNIVKKTEVQTGGFYKESILSKGNSDKLIPRKNNWDTRKYGGFDSPTVAYSVLVIAKMEKGKAKVLKPVKEMVGITIMERTAFEENPVVFLEARGYREIQEHLIIKLPKYSLFELENGRRRLLASASELQKGNELFLPVDYMTFLYLAAHYHELTGSSEDVLRKKYFVDRHLHYFDDIIQMINDFAERHILASSNLEKINHTYHNNSDLPVNERAENIINVFTFVALGAPAAFKFFDATIDRKRYTSTKEVLNATLIHQSVTGLYETRIDLSQLGEN

SEQ ID NO: 122 - protein, 1340 aa, Enterococcus faecium
MKKEYTIGLDIGTNSVGWSVLTDDYRLVSKKMKVAGNTEKSSTKKNFWGVRLFDEGQTAEARRSKRTARRRLARRRQRILELQKIFAPEILKIDEHFFARLNESFLVLDEKKQSRHPVFATIKQEKSYHQTYPTIYHLRQALADSSEKADIRLVYLAMAHLLKYRGHFLIEGELNTENSSVTETFRQFLSTYNQQFSEADDKQTEKLDEAVDCSFVFTEKMSKTKKAETLLKYFPHEKSNGYLSQFIKLMVGNQGNFKNVFGLEEEAKLQFSKETYEEDLEELLEKIGDDYIDLFVQAKNVYDAVLLSEILSDSTKNTRAKLSAGMIRRYDAHKEDLVLLKRFVKENLPKKYRAFFGDNSVNGYAGYIEGHATQEDFYKFVKKELTGIRGSEVFLTKIEQENFLRKQRTFDNGVIPHQIHLTELRAIIANQKKHYPFLKEEQEKLESLLTFKIPYYVGPLAKKQENSPFAWLIRKSEEKIKPWNLPEIVDMEGSAVRFIERMINTDMYIPHNKVLPKNSLLYQKFSIYNELTKVRYQDERGQMNYFSSIEKKEIFHELFEKNRKVTKKDLQEFLYLKYDIKHAELSGIEKAFNASYTTYHDFLTMSENKREMKQWLEDPELASMFEEIIKTLTVFEDREMIKTRLSHHEATLGKHIIKKLTKKHYTGWGRLSKELIQGIRDKQSNKTILDYLINDDDFPHHRNRNFMQLINDDSLSFKKEIKKAQMITDTENLEEIVKELTGSPAIKKGILQSLKIVDEIVGIMGYEPANIVVEMARENQTTGRGLKSSRPRLKALEESLKDFGSQLLKEYPTDNSSLQKDRLYLYYLQNGRDMYTGAPLDIHRLSDYDIDHIIPRSFTTDNSIDNKVLVSSKENRLKKDDVPSEKVVKKMRSFWYDLYSSKLISKRKLDNLTKIKLTEEDKAGFIKRQLVETRQITKHVAGILHHRFNKAEDTNEPIRKVRIITLKSALVSQFRNRFGIYKVREINEYHHAHDAYLNGVVALALLKKYPQLAPEFVYGEYLKFNAHKANKATVKKEFYSNIMKFFESDTPVCDENGEIFWDKSKSIAQVKKVINHHHMNIVKKTEIQKGGFSKETVEPKKDSSKLLPRKNNWDPAKYGGLGSPNVAYTVAFTYEKGKARKRTNALEGITIMEREAFEQSPVLFLKNKGYEQAEIEMKLPKYALFELENGRKRMVASNKEAQKANSFLLPEHLVTLLYHAKQYDEISHKESFDYVNEHHKEFSEVFARVLEFAGKYTLAEKNIEKLEKIYKENQTDDLAKLASSFVNLMQFNAMGAPADFKFFDVTIPRKRYTSLTEIWQSTIIHQSITGLYETRIRMGK

SEQ ID NO: 123 - protein, 1330 aa, Enterococcus italicus
MKNDYTIGLDIGTNSVGYSVVTDDYKVISKKMNVFGNTEKKSIKKNFWGVRLFESGQTAQEARMKRTSRRRIARRKNRICYLQEIFQPEMNHLDNNFFYRLNESFLVADDAKYDKHPIFGTLDEEIHFHEQFPTIYHLRKYLADGDEKADLRLVYLAIAHIIKFRGNFLIEGELNTENNSVIELSKVFVQLYNQTLSELEGFQFIDESIDFSEVLTQQLSKSERADNVLKLFPDEKGTGIFAQFIKLIVGNQGNFKKVFQLEEDQKLQLSTDDYEENIENLLAIIGDEYGDIFVAAQNLYQAILLAGILTSTEKTRAKLSASMIQRYEEHAKDLKLLKRFVKEHIPDKYAEIFNDATKNGYAGYIDGKTKEEEFYKYLKTTLVQKSGYQYFIEKIEQENFLRKQRIYDNGVIPHQVHAEELRAILRKQEKYYSFLKENHEKIEQIFKVRIPYYVGPLAKHNEQSRFAWNIRKSDEPIRPWNMNDVVDENASAVAFIERMTIKDIYLNENVLPRHSLIYEKFTVFNELTKVLYADDRGVFQRFSAEEKEDIFEKLFKSERKVTKKKLENYLRIELSISSPSVKGIEEQFNANFGTYLDLKKFDELHPYLDDEKYQDTLEEVIKVLTVFEDRSMIQNQLEQLPLNLSTKTIKALSRRKYTGWGRLSARLIDGIHDKNSGKTILDYLIEDESDSYIVNRNFMQLINDDHLSFKKIIEDSQPYKEQQSAEEIVSELSGSPAIKKGILQSLKIVDELVAIMGYKPKNIVVEMARENQTTGRGKQNSKPRLKGIENGLKEFSDSVLKGSSIDNKQLQNDRLYLYYLQNGKDMYTGHELDIDHLSTYDIDHIIPQSFLTDNSIDNRVLTTSKSNRGKSDNVPSEEVVRKMDRFWRKLLNAKLISERKYTNLTKKELTESDKAGFLKRQLVETRQITKHVATILDSKFNEDSNNRDVQIITLKSALVSEFRKTFNLYKVREINDLHHAHDAYLNAVVALSLLRVYPQLKPEFVYGEYGKNSIHDQNKATIKKQFYSNITRYFASKDYIINDDGEILWNKQETIAQVIKTLGMHQVNVVKKVEIQKGGFSKESIQPKGESQKLIRRKQQWNTKKYGGFDSPVVAYAILLSFDKGKRKARSFKIVGITIQDRESFEGNPILYLSKKDYHNPKVEAILPKYSLFEFENGRRRMVASASETQKGNQLIIPGHLMELLYHSKKIINGKNSDSVSYIQNNKEKFREIFEYIVDFSSKYISADANLNKIEKIFENNFHKASEQEIAKSFINLLTFTAMGAPADFEFFGEKIPRKRYVSISEIIDAVFIHQSITGLYETRVRLTEV

SEQ ID NO: 124 - protein, 1384 aa, Streptococcus agalactiae
MNKPYSIGLDIGTNSVGWSIITDDYKVPAKKMRVLGNTDKEYIKKNLIGALLFDGGNTAADRRLKRTARRRYTRRRNRILYLQEIFAEEMSKVDDSFFHRLEDSFLVEEDKRGSKYPIFATLQEEKDYHEKFSTIYHLRKELADKKEKADLRLIYIALAHIIKFRGHFLIEDDSFDVRNTDISKQYQDFLEIFNTTFENNDLLSQNVDVEAILTDKISKSAKKDRILAQYPNQKSTGIFAEFLKLIVGNQADFKKYFNLEDKTPLQFAKDSYDEDLENLLGQIGDEFADLFSAAKKLYDSVLLSGILTVIDLSTKAPLSASMIQRYDEHREDLKQLKQFVKASLPEKYQEIFADSSKDGYAGYIEGKTNQEAFYKYLSKLLTKQEDSENFLEKIKNEDFLRKQRTFDNGSIPHQVHLTELKAIIRRQSEYYPFLKENQDRIEKILTFRIPYYIGPLAREKSDFAWMTRKTDDSIRPWNFEDLVDKEKSAEAFIHRMTNNDFYLPEEKVLPKHSLIYEKFTVYNELTKVRYKNEQGETYFFDSNIKQEIFDGVFKEHRKVSKKKLLDFLAKEYEEFRIVDVIGLDKENKAFNASLGTYHDLEKILDKDFLDNPDNESILEDIVQTLTLFEDREMIKKRLENYKDLFTESQLKKLYRRHYTGWGRLSAKLINGIRDKESQKTILDYLIDDGRSNRNFMQLINDDGRSNRNFMQLINDDGLSFKSIISKAQAGSHSDNLKEVVGELAGSPAIKKGILQSLKIVDELVKVMGYEPEQIVVEMARENQTTNQGRRNSRQRYKLLDDGVKNLASDLNGNILKEYPTDNQALQNERLFLYYLQNGRDMYTGEALDIDNLSQYDIDHIIPQAFIKDDSIDNRVLVSSAKNRGKSDDVPSLEIVKDCKVFWKKLLDAKLMSQRKYDNLTKAERGGLTSDDKARFIQRQLVETRQITKHVARILDERFNNELDSKGRRIRKVKIVTLKSNLVSNFRKEFGFYKIREVNNYHHAHDAYLNAVVAKAILTKYPQLEPEFVYGDYPKYNSYKTRKSATEKLFFYSNIMNFFKTKVTLADGTVVVKDDIEVNNDTGEIVWDKKKHFATVRKVLSYPQNNIVKKTEIQTGGFSKESILAHGNSDKLIPRKTKDIYLDPKKYGGFDSPIVAYSVLVVADIKKGKAQKLKTVTELLGITIMERSRFEKNPSAFLESKGYLNIRADKLIILPKYSLFELENGRRRLLASAGELQKGNELALPTQFMKFLYLASRYNESKGKPEEIEKKQEFVNQHVSYFDDILQLINDFSKRVILADANLEKINKLYQDNKENISVDELANNIINLFTFTSLGAPAAFKFFDKIVDRKRYTSTKEVLNSTLIHQSITGLYETRIDLGKLGED

SEQ ID NO: 125 - protein, 1370 aa, Streptococcus ratti
MKKPYSIGLDIGTNSVGWAVITDDYKVPAKKMKVLGNTDKNYIKKNLLGALLFDSGNTAEDRRLKRTARRRYTRRRNRLLYLQDIFSDEMNKVDESFFHRLEDSFLVSEDKRGDHHPIFGNVVDEVKYHEQFPTIYHLRKYLADTPEKADLRLVYLALAHMIKFRGHFLIDDPKLDVKNTDSQELFSQFLTAYDVTQEDSHLADVKINISDIITEKMNKSRKVEALLFHFPSQKKNSFFGNLVSLVFGLLPNFKTNFNLAEDAKLQLSKDSYDEDLENLLGQIGDEYTDVFVAARKLYDSILLSGILTVNDLSTKAILSASMVRRYEEHNKDLAKLKAFVKANFTHDVFKEVFSDASKNGYAGYIEGKTSQEDFYKYVKNLIGKVDGSADFIEKIDREDFLRKQRTFDNGSIPHQVHLAEMKAILRRQGEYYPFLKEHAEKIQQILTFRIPYYVGPLDRHGHSDFAWASFNSEEKVTPWNFEEIIDKNKSAQAFIERMTNQDLYLPNEKVLPKHSPLYEKYTVYNELTKIKYVTETGTAKFFDANLKQEIFDGLFKKERKVTKRKLLTFLEKNFDEFRIVDIQGLDKETETFNASYGIYQDLLKIIKDKAFMDDSENADILEDIVLTLTLFEDREMIKQRLAKYADLFDKKVIDNLARRRYTGWGRLSAKLLNGIRDKRSRKTIMDYLVDDGRSNRNLMQLITDDNLTFKDEIAKAQYSDNSDDLHQVVQDLAGSPAIKKGILQSVKIVDELVKVMGYEPEQIVVEMARENQTTAKGRRNSQQRYKRLEEAIKNLDRDLNYKILKEHPTDNQALQNDRLFLYYLQNGRDMYTGESLDINRLSDYDIDHIIPQAFIKDNSIDNRVLVSSAKNRGKSDDVPSEDVVNRMRPFWNKLLNCGLISQRKYSNLTKKELTPNDKAGFIKRQLVETRQITKHVARILDEHFNKEFDEDKKRIRKVKVVTLKSNLVSNFRKEFELYKVREINDYHHAHDAYLNAVVAKALLMKYPKLEPEFVYGEYPKYNSYRERKTATQRMFFYSNIMNMFKSKVKLADERIIERPMIEVNDETGEIAWDKTKHIATVKKVLSYPQINIVKKVEEQTGGLTNETIYPRGSFDKLLNRKNTLEASKYGGFGSPTVAYCVLVVADSKNENGKVKKLKLGSELLGITILEKNDFENNSLDFLSRKGYQGVQEKKIIKLPKYSLFEFQDGSRRMLSSVMANDNKRGDLQKANEMILPAYLVKLLYHAKHINSVGEPAHKNYINEHCSEFQDLLNYIRQFADKFVDVDKNLSKIRSLSKSMAEYSVSEICSSFVNLLTLTALGAPADFKFFGTTIPRKRYGSPQSILSATLIHQSITGLYETRIDLSKLGED

SEQ ID NO: 126 - protein, 1345 aa, Listeria monocytogenes
MQLKIIEGMKKMKKPYTIGLDIGTNSVGWAVLTDQYDLVKRKMKIAGDSEKKQIKKNFWGVRLFDEGQTAADRRMTRTARRRIERRRNRISYLQGIFAEEMSKVDANFFCRLSDSFYVDNEKRNSRHPFFATIEEEVEYHKNYPTIYHLREELVNSSEKADLRLVYLALAHIIKYRGNFLIEGALDTQNTSVDGIYKQFIQTYNQVFASGIEDGSLKKLEDNKDVAKILVEKVTRKEKLERILKLYPGEKSAGMFAQFISLIVGSKGNFQKPFDLIEKSDIECAKDSYEEDLESLLALIGDEYAELFVAAKNAYSAVVLSSIITVAEAETNAKLSASMIERFDTHEEDLGELKAFIKLHLPKHYEEIFSNTEKHGYAGYIDGKTKQADFYKYMKTTLENIEGADYFIAKIEKENFLRKQRTFDNGAIPHQLHLEELEAILHQQAKYYPFLKENYDKIKSLVTFRIPYFVGPLANGQSEFAWLTRKADGEIRPWNIEEKVDFGKSAVDFIEKMTNKDTYLPKENVLPKHSLCYQKYLVYNELTKVRYINDQGKTSYFSGQEKEQIFNDLFKQKRKVKKKDLELFLRNMSHVESPTIEGLEDSFNSSYSTYHDLLKVGIKQEILDNPVNTEMLENIVKILTVFEDKRMIKEQLQQFSDVLDGVVLKKLERRHYTGWGRLSAKLLMGIRDKQSHLTILDYLMNDDGLNRNLMQLINDSNLSFKSIIEKEQVTTADKDIQSIVADLAGSPAIKKGILQSLKIVDELVSVMGYPPQTIVVEMARENQTTGKGKNNSRPRYKSLEKAIKEFGSQILKEHPTDNQELKNNRLYLYYLQNGKDMYTGQELDIHNLSNYDIDHIVPQSFITDNSIDNLVLTSSAGNREKGDDVPPLEIVRKRKVFWEKLYQGNLMSKRKFDYLTKAERGGLTETDKARFIHRQLVETRQITKNVANILHQRFNYEKDDHGNTMKQVRIVTLKSALVSQFRKQFQLYKVRDINDYHHAHDAYLNGVVANTLLKVYPQLEPEFVYGDYHQFDWFKANKATAKKQFYTNIMLFFAQKDRIIDENGEILWDKKYLDTVKKVMSYRQMNIVKKTEIQKGEFSKATIKPKGNSSKLIPRKTNWDPMKYGGLDSPNMAYAVVIEYAKGKNKLVFEKKIIRVTIMERKAFEKDEKAFLEEQGYRQPKVLAKLPKYTLYECEEGRRRMLASANEAQKGNQQVLPNHLVTLLHHAANCEASDGKSLDYIESNREMFAELLAHVSEFAKRYTLAEANLNKINQLFEQNKEGDIKAIARSFVDLMAFNAMGAPASFKFFETTIERKRYNNLKELLSSTIIYQSITGLYESRKRLDD

SEQ ID NO: 127 - protein, 1365 aa, Lactobacillus sp.
MTKLNQPYGIGLDIGSNSIGFAVVDANSHLLRLKGETAIGARLFREGQSAADRRGSRTTRRRLSRTRWRLSFLRDFFAPHITKIDPDFFLRQKYSEISPKDKDRFKYEKRLFNDRTDAEFYEDYPSMYHLRLHLMTHTHKADPREIFLAIHHILKSRGHFLTPGAAKDFNTDKVDLEDIFPALTEAYAQVYPDLELTFDLAKADDFKAKLLDEQATPSDTQKALVKLLLSSDGEKEIVKKRKQVLTEFAKAITGLKTKFNLALGTEVDEADASNWQFSMGQLDDKWSNIETSMTDQGTEIFEQIQELYRARLLNGIVPAGMSLSQAKVADYGQHKEDLELFKTYLKKLNDHELAKTIRGLYDRYINGDDAKPFLREDFVKALTKEVTAHPNEVSEQLLNRMGQANFMLKQRTKANGAIPVQLQQRELDQIIANQSKYYDWLAKPNPVEKHRASKPYQLDELLTFRIPYYVGPLITPKQQAESGENVFAWMVRKNPSGNITPYNFDEKVDREASANTFIQRMKTTDTYLIDEDVLPKQSLLYQKYEVLNELNNVRINNEALSTDQKQRLIHEVFERHSSVTIKQVVDNLVAHGDFAQRPEIRGLADEKRFLSSLSTYHQLKEILHGAIDDSTKLHDIENIITWSTVFEDAAIFKTKLAEIDWLDPATIKKLSNIRYRGWGQFSRKLLDGLKLGNGHTVIQELMLSNHNLMQILADETLKETMTELNQDKLKTDDIEDVINDAYTSPSNKKALRQVLRVVEDIKHAANGQDPSWLYIETADGTGTAGKRTQSRQKQIQTVYANAAQELIDSAVRGELEDKIADKASFTDRLVLYFMQGGRDIYTGAPLNIDQLSHYDIDHILPQSLIKDDSLDNRVLVNATINREKNNVFASTLFASKMAATWRKWHEAGLISGRKLRNLMLRPDETDKFAHGFVARQLVETRQIIKLTEQIAAAQYPNTKIIAVKAGLSHQLREELDFPKNRDVNHYHHAFDAFLAARIGTYLLKRYPKLAPFFTYGEFAKVDVKKFREFNFIGALTHAKKNIIAKDTGEIVWDKERDIQELDRIYNFKRMLITHEVHFETADLFDQTIYAAKDSKERGGRMSLIPKKLGYLTGIYGGYQTERGSYVSIIRTFKKGETIYKVVNILTADVSLLSEKEKVSKTLADIYLKELIAKKLSKGKSGKNIASEPFEIVLPRVGKDSLFKNKKYGLFLIESATELHNYQELWLPRNDQLLIKRIQARQIEESKADYELTRMYRNIAWQVDHYFRLYKIRKFAEKLQASVEDFAGLPVYKNETSDGKVEVLASVLKRLNGAADKGRTNPTTVKLQSDFGRTLLTNGIVLEDDSSIVYQSPTGLFKRSVKLVDL

SEQ ID NO: 128 - protein, 1366 aa, Pediococcus acidilactici
MGDRKYNLGLDIGTSSIGFAAVDENNQPIRVKGKTAIGVRLFEEGKTAADRRGFRTTRRRLSRRRWRINLLNEIFDAHLAEVDPTFLARLKESNRSNLDPKKSFQGSLLFPERKDYQFYEEYPTIYHLRKALMEEDRKFDIREIYLAVHHIIKYRGNFLNGTPMRSFKVENIELDTLFDQLNQLYAEIVPDNELAFDLAQVADVKDVLSSTTIYKMDKKKQLVKMMLLPASNKALQSENKKIVTQFVNAILNYKFKLDVLLQVETDADWSLKLNDEGADDKLEEFTGDLDENRLEIIDLLQRLHNWFSLNEITKDGNSLSAAMVEKYENHHHHLGLLKKVIENHPDAKKAKALKETYTAYVGKTDDKTQNQDDFYKAVEKNLDDSPDAKEIKRLIQLDQFMPKQRTGQNGAIPHQLHQQELDQIIEKQSKYYPFLAEPNPNVKRRKDAPYKLDELIAFKIPYYVGPLVTPEEQAQNKENVFAWMKRKAAGPITPWNFDEKVDRMESANRFIRRMTTKDTYLFGEDVLPAESMIYQKFVVLNELNNLKINGRHLSLKDKQDVYNDLFKQQKTVSIKALQNYYVTKKKAATAPTVGGLADPKKFLSSLSTYIDFKNMFGERVNDPQFQEDLEQIVEWSTIFEDRGIFKAKLQALGWLSEKQIQQLVAKRYKGWGRLSKKLLTGLKNAEGYSILDEMWRSTENFMQIQTRPEFAALIQQANEKQFEGNDPNNVWENIESILGDAYTSPQNKKAIRQVVKVVQDIEKAVGNPPEKIAIEFTREAAANPQRTQSRLRTLEKLYESAEEVVDAGLTAELAEFKENKHVLSDKYYLYFTQLGRDVYTGDTISLDKLNDYDVDHILPQSFIKDDSLDNRVLTIRAVNNGKSDNVPAKMFGKKMGSFWRYLLDNGMISKRKYNNLITDPDNISKYAQKGFINRQLVETSQVIKLTANILNGIYDKDTEIIEVPAKMNSQMRKMFDLVKVREVNDYHHAFDAYLTIFIGKYLYKCYPKLRPYFVYGKFKKFGDNEDIEVGDGRFNFLNRIERLKNVTDPETGEILWSNVAPNETIKQIKKVYNYKFMLVSRETTTRRAELFNQTVYPKNYRGKLIPIKEDRPTDLYGGYSGNTDAYLAIVALEDKKKGKYFKVVGIPTRAAAKLEKLKQQDSQQYLQALHKVIAPQFTKSTKKGIKKTEFEIVLDKVHYRQLVQDGPVKMMLGSSTYKYNAKQLVLSEKALQVIADDRKFDETQKDDNLIAVYDEILSIVNQSFDLYDINGFRKKLNDNRDQFIDLPAETKYEGRKVVAHGKREMILEILKGLHANAAFGNLKPIGFSTAFGQLQVPNGIILSKNAILIHQSPSGLFERKIKLSDL

SEQ ID NO: 129 - protein, 1358 aa, Acidaminococcus sp.
MGKMYYLGLDIGTNSVGYAVTDPSYHLLKFKGEPMWGAHVFAAGNQSAERRSFRTSRRRLDRRQQRVKLVQEIFAPVISPIDPRFFIRLHESALWRDDVAETDKHIFFNDPTYTDKEYYSDYPTIHHLIVDLMESSEKHDPRLVYLAVAWLVAHRGHFLNEVDKDNIGDVLSFDAFYPEFLAFLSDNGVSPWVCESKALQATLLSRNSVNDKYKALKSLIFGSQKPEDNFDANISEDGLIQLLAGKKVKVNKLFPQESNDASFTLNDKEDAIEEILGTLTPDECEWIAHIRRLFDWAIMKHALKDGRTISESKVKLYEQHHHDLTQLKYFVKTYLAKEYDDIFRNVDSETTKNYVAYSYHVKEVKGTLPKNKATQEEFCKYVLGKVKNIECSEADKVDFDEMIQRLTDNSFMPKQVSGENRVIPYQLYYYELKTILNKAASYLPFLTQCGKDAISNQDKLLSIMTFRIPYFVGPLRKDNSEHAWLERKAGKIYPWNFNDKVDLDKSEEAFIRRMTNTCTYYPGEDVLPLDSLIYEKFMILNEINNIRIDGYPISVDVKQQVFGLFEKKRRVTVKDIQNLLLSLGALDKHGKLTGIDTTIHSNYNTYHHFKSLMERGVLTRDDVERIVERMTYSDDTKRVRLWLNNNYGTLTADDVKHISRLRKHDFGRLSKMFLTGLKGVHKETGERASILDFMWNTNDNLMQLLSECYTFSDEITKLQEAYYAKAQLSLNDFLDSMYISNAVKRPIYRTLAVVNDIRKACGTAPKRIFIEMARDGESKKKRSVTRREQIKNLYRSIRKDFQQEVDFLEKILENKSDGQLQSDALYLYFAQLGRDMYTGDPIKLEHIKDQSFYNIDHIYPQSMVKDDSLDNKVLVQSEINGEKSSRYPLDAAIRNKMKPLWDAYYNHGLISLKKYQRLTRSTPFTDDEKWDFINRQLVETRQSTKALAILLKRKFPDTEIVYSKAGLSSDFRHEFGLVKSRNINDLHHAKDAFLAIVTGNVYHERFNRRWFMVNQPYSVKTKTLFTHSIKNGNFVAWNGEEDLGRIVKMLKQNKNTIHFTRFSFDRKEGLFDIQPLKASTGLVPRKAGLDVVKYGGYDKSTAAYYLLVRFTLEDKKTQHKLMMIPVEGLYKARIDHDKEFLTDYAQTTISEILQKDKQKVINIMFPMGTRHIKLNSMISIDGFYLSIGGKSSKGKSVLCHAMVPLIVPHKIECYIKAMESFARKFKENNKLRIVEKFDKITVEDNLNLYELFLQKLQHNPYNKFFSTQFDVLTNGRSTFTKLSPEEQVQTLLNILSIFKTCRSSGCDLKSINGSAQAARIMISADLTGLSKKYSDIRLVEQSASGLFVSKSQNLLEYL

SEQ ID NO: 130 - protein, 1396 aa, Lactobacillus sp.
MTKRIDDYILGLDIGTNSCGWAVTDKKNNLLKLRGKTAIGSHLFDEGHTAAERRSFRTTRRRLKRRKWRLGLLEEIFAEPMAKVDPGFFVRLHQSWVSPLDKDRKKYQAIVFPTAKEDQAFYKHYATIYHLRDELMTQDRQFDLREIFLAIHHIVKYRGNFLQDTPVKDFEASKIEVGPILSHINNAFAEKIVEEQDPIELNVANATDIEAVIRGKDAEKTVYKMDKVKKIAKLLTDSTAKEEKNLAKQIANAIMGYKTQFETILGKEIDKSDKAQWEFKLTDGDADDKLDALLPDLDETDQTIIAEIKKLFSAITLSTIVDENKSLSQSMVAKYDKHHQDYKLLKAYIDTLQDRSIAKKLLLAYDLYVNNRHGRLLEAKKTFEDKKKKKALTKDEFYKIVKDNLDDSDLAHEIRQEIAADNFMPKQRTNSNGVIPFQLHQIELDKIIANQSQYYPFLAAENPVEDHRKQAPYKLDELVRFRVPYYVGPMITADQQKKTSGKSFAWMVRKEDGQITPWNFEQKVDRQESANKFIKRMTIKDTYLLGEDVLPANSLLYQRFEVLNELNNIRINGSRISVDLKQQIFNDLFEEKKTVTEKSLTSYLKQNLHLPTVEIKGLADPTKFNSSLASYYHLKSLHVFDKELADPQYQKDFEKIIEYSSIFEDKKIFQDKLHAEFKWLTPEQFKAISTWRLQGWGRLSRKLLVELHDTNGQNIMEQLWDSQKNFMQIVTEPDFKEAIAKENQNVTQANGVEEILADAYTSPANKKAIRQVVKVVADVVKAAGGKKPAQFAIEFTREPDKNPKLSHIRGTKLLKAYQETAGELVDQKLTDSLKEAMTSRKLLKDKYFLYFMQAGRDAYTGQKINIDEVSTNYQIDHILPQSFIKDDSFDNRVLTATPLNAEKSDDVPYKRFANNYVSDLKMTVGEMWKHWQKDGIINKHKLGNLLLDPDRLNKYQKSGFINRQLVETSQIVKLVSVILQNKYPDSEIITVKAGDNSALRQRLNLYKSREVNDYHHAIDAYLSIICGNFLYQVYPKYRPYFVYGKYKKFSQDPDLQKEVIKHFKGFTFMWPLLQKDNSERKAPEKIKENNSDRIVFYKHPDIFDKLRKAYNYKYMLVSRETNTENSGLFDVTIYPRGERDLAKTRKLIPKGNGLDPKIYGGYSGNSGAYMVIVKIEQAKKSIYKVIGVPMRTLASLNQAKKQGNYQGELHKVLEPQIMFDNKGKPKRGVKGFRVIKDHVPFKQVVLDGDKKFMLYSDQYEANAKQLTLSQETMRIVTDNLKKGEDQDQLLVEAYDEILQKVDQYLPLFDMKGFRNGLHKGRDKFIELSTNDKKSTLSNILNGLHDNMVEIKMEYLGIRTPFGRLQSSSGINLSPDAVLIYQSPTGLFEKRVKIADL

SEQ ID NO: 131 - protein, 1395 aa, Treponema putidum
MKKEIKDYFLGLDVGTGSVGWAVTDTDYKLLKANHKDLWGMRCFETAETAEKRRLFRGARRRIERRRKRIKLLQELFSQEIAKIDEDFFQRMEESPFYAEDKTILQENTLFNDRDFTDKTYHKAYPTINHLIKAWIENKVKPDPRLLYLACHNIIKKRGHFLFEGDFDSENQFDTSVQALFEYLREDMELDIDADSKKIKEILKDSALKNSDKQNRLNKLLGLKSSDKQKKALTNLISGNKANFADLYDNPDLKDAEKNSISFSKDDFDALSDELASVLGDSFELLLRAKAVYNCSVLSKVIGDEQYLSFAKVKIYEKHKNDLTKLKEVVKKYFPIEYRNIFGYKQSENNNCNYSRYVGVCKSGSKKKVINKTASQEDFYKFLKDILLKRSDVPEANGILTEIETGTFLPKQISKNNAEIPYQLRKIELEKILTNAEKFFSFLKQKDENGLSHSEKIIMLLTFKIPYYIGPINTSHKQYFPDRSWVIKKENAPQEKITPWNFFDHIDKEKTAEAFITSRTNFCTYLIGESVLPKNSLLYSEYTVLNEINNLQIIIDGKNICDVKLKQKIYEELFKKYKKVTQKQISTFIKHEGICNKTDEVIILGIDKECTSSLKSYIELKNIFGKQVDEISTKNMLEDIIRWATIYDEGEGKTILKTKIKAEYEKYYSDEQIKKILNLKLSGWGRLSRKFLESITSEIPGFIEPVNIITAMRETQNNLMELLSSKFKFNENIKKINSGFEDTDKRFSYNSLVKPLFLSPSVKKMLWQTLKLVKEISHITQAPPKKIFIEMAKGAELEPARTKTRLKILQDLYNSCKNDADAFSSEIQYLLGKIENEDNLRLRSDKLYLYYTQLGKCMYCGKPIEIGHVFDTSKYDIDHIYPQSKIKDDSINNRVLVCSSCNKNKEDKYPLKPEIQLKQKKFWNFLQRNNFISIEKFNRLTRTTPISDDETAKFIARQLVETRQATKVAAKVLEKIFPETNIVYSKAETVSMFRNKFDIIKCREINDFHHAHDAYLNIVVGNVYNTKFTNNPWNFIKEKRDNPKIGDTYNYYKVFDYDVKRNNITAWEKEKTIITVKTMLKRNTPIYTRQAACKKGELFNQTIMKKGLGQHPLKKECPFSNISKYGGYNKVSAAYYTFIEYEEKGNKIRSLETIPLYLEKDIQKSQDGLKGYLTDQLGKKEIKILVPKIKINSLLKINGFPCHITGKTGASFVLRPAVQFCCSNDEVLYFKKIIRFNEIRSQREKMGKTISPYEDLSFRSYIKENLCKKTKNDEIGEKEFYGFLQKKNLEIYDMLLIKHKDTIYSKRPNSTTLDMLIKGRYEFINLKPEDQIRVMLEILKLFCTTREVIDLGLIKGKSEAGVTTLGKKISNLDSCILIYQSITGIFEKRIDLLKI

SEQ ID NO: 132 - protein, 1345 aa, Eubacterium sp.
MGNKLRNVDDYYLGLDIGTESVGWAVTDKYYVIPKFKGNAMWGVHLFDEGETSVKRRGFRSARRRTQRKRERLALLEALFDEEICKKDCTFFRRLHESDLWPEDKSGDDKYAVFADENYTDKDFHKEYPTIYHLRYELIKNKEPHDVKLVFLALHHIIKNRGHFLFDSLSSAEDFNSAYETMCSYLSDNEIQLNCSDIEQFKAILKDRRQGKIEKTKNLASLFGITKKSDPVSYAVMAVLSGSTVKMCDLFGDDELKTVEKNNISFASGYEENEEIYASVLGDRFELVKILKAVYDWAVLADILDGKKYISEAKVAVYEKHKNDLKTLKKYVKTYLPEKYNEIFKISDGKKDNYVAYSGHIKESGKTGELKKTCNSENFCAYLKKTLGKNADLSYKEMFDEIENKTFMPKQVTKSNGVVPMQVNEEELKAILDNAKDYLSFLNSCDENGVSVYDKIIKIFEYRIPYYVGPLNTHTENSWLKRKDGVKIYPWNFDDVVDIDSSAEKFINNLTSKCTYLPECDVIPKCSLLYSKFTVLNEINNLKLNGEDIPVELKQGIYKDLFMTRRKVTVKQIKDYLKARGCYDNNDVLSGIDTTVKSSLKSYFDFKGFESLTFDDKESIIASSVIFGDDKKLLKKRLKKLFPEKLTDEDIKKICKLKYTGWSRLSKEFLCDVEFTYKKTGEVMNVITALWETNYNLMQILYSEDFCCDGDEKKNLNDKLDELSYTGDQHSLRKAVDALYVSPKVKRPILRALLIAKEIEKIQERPPKKIFVEVARGIDNREERHRDSRKNRLMELYKNCKKEAEKFCPYFDALSKKLSDEDESKLRRDKLYFYYIQLGKCMYTGEEISLGELMNGNGRFDIDHIYPRSKIKDDSLTNKVLVNKTVNNNKTNVYPIDAAIQSKMSPYWQMLRSSGLISEETYKRLTRKTPLTDDELSAFVSRQLTETQQSTKAVAHILEQLYPKPKTEIVYVKAALVHAFRQSNDMLKCREVNDLHHAKDAYLNIVVGNAYNVKVTHNKVNFIKGLQNNDKGYTVNPEKFFSHDIPGAWSVKDSMNTVRRFMNKNNIRYTRFPRKKQGGLFKINPLKKGNGQVPLKASGARSCIEKYGGYDKATSAYFSYVEYTDKKGKAVRQMFPVNLYEVKEYEADMQGFVTSRIAEASNVKILIPCVKYDACISFDGCRMFITKKTGNRIGYKPGMQLVLGYKYEKYIRNIENYLTKHKDREIIPRDNISAEENIELYDILTGKMLNTVLSVKFSGIGKKLEKRREKFVLCSPEEQCCVLNEILKILHANVLSGDLSLIGESPNTGTMKTNAKFSEIKDVHSIKLINQSVTGLFEQEIDLLK

SEQ ID NO: 133 - protein, 1239 aa, Bifidobacterium bombi
MSQHRRYRIGIDVGLNSVGLAAVEIDANHDNPLDEIPISILNAQSVIHDGGVDPDEAKSATSRRASAGVARRTRRLHKSKRQRLAKLDEVLNELGYPVEDESQFPAGSNPYIAWQVRAKLAETFIPDVETRKRMISIAIRHIARHRGWRNPYSSVADAERMSHTPSPFMVEYAKKLDFEINDRRTNGFYHSPWQSVDEEGKRLSKSELEKQPKIEDWNDNPINGKTIAQLVVSSLEPQTKIRRDLTHGLQTESTLNIQTEKLHQSDYIHELETIFERQHVDQTTQEQLLEATFHTKNPKAVGAAAKLVGKDALDSRYYRASRATPAFEEYRVMAAIDTLRIREHGTERQLTTDERRKLFDFIKGLPSKKTKNEPSISSLTWGDVADFLGIQRIDLRGLGSLKDGEPVSAKQPPVIETNDIMQKAPDPIAAWWSQANTKERDRFVEFMSNAGAIKDTSDEVRNIDAEISQLLEELTGSELESLDKITLTSGRAAYSSQTLRNITNYMYETGCDLTTARQELYHVGKNWAPPAPPIYEHTGNPSVDRTFSIIHRWLCNMRDQYGEPETVNIEYVRDGFSSTSTQLAEQRERDRRYADNLKMLSNYEGASSRSDVRRIKALQRQNCQCIYCGRTITFETCQMDHVLPRKGPGSDSKFENLVATCGECNKSKSDTLYMNWAKTYPNTNLQDVLRRIQEWSKDGWMTDKRWRQYKEALILRLEATEKQEPLDNRSMESVSYMARELRNRIYGFYGWHDQDDALKQGRQRVFVSSGSMTAAARRTPFESPLIKGADEETYESSLPWLDGMKGKTRLDRRHHAVDASIIAMMRPQIVKILTEAQEIRSEQHDKYRKGQTPDYVCKRRDYWRNWRGTPDTRDEEVFNYWAGEQLRTLTDLVSQKMADDEIPVIYPTRLRLGNGSAHKDTVVSMMTRKVGDELSITAINKAESGALYTALTRDSDFDWKTGLSANPNRRIRVHDKWFEADDTIKFLEPAVEVVLKNNTRARIDPEALDKVHSTLYVPVRGGIAEAGNSIHHVRFYKIPKLNSKGKQTGSIYAMLRVLTIDLAMNQYDKETGKKQDLFTLPLPESSLSRRFSEPKLRQALIDGTAEYLGWAVVDDELEIPAFANARITEEQAINGSFTDRLLHSFPGTHKFRFAGFSRNTEIAIRPVQLASEGLIETDENRKRQQLRLTQPNTEYSNSIKNVLKSGLHLKVNTLFQTGILVTRANSQGKQSIRFSTVEE

SEQ ID NO: 134 - protein, 1095 aa, Corynebacterium camporealensis
MQKNYRVGIDVGTHSIGFAAIEVDDHDRPIHILSAMSLIHDSGLDPDSNKRALTRLAESGVARRTRRLYRRRRKRMVRLEKFLQHQGWETKPFEDYSDPYIPWNARVALVNGYIEDDQQRGEYLSIALRHIANHRGWRNPYWKTRSLYSPEGPSDAFETIRKDLEKRAGRPVPKDITVGQLITFARIGTDRIRGEAQNKKTGHNNPAILSARLHQLDHAREINEIAKVQKLDDDLRKHIIDLVFAAESPKGAQLGRVGKDPLQPGKDRALKATDAFQRYRIAALTGNLRIRGTQGNDRLTREQRQLIFDHLVNLPHTEEPSWLNIAEILGIDRGDLLGTATMTDDGERAGSKPPVHDTNRAILSSKVKPLVHWWKAANFDEQKAMLKSLSNAEVDDFDSPAGASVQAFFADLDEKQHDKLDSLHLPMGRAAYSEDTLVRLTERMLNNNQDLYEARLAEFNIAKDWTPPKPRIGEPVGNPAVDRVLKATARWLEAAHKEWGAPKSIIIEHVRDGFISEAKAREIDRDNNRRAQRNRELFGKMQSKLGIEGKPRSADLWRFQSVQRQNCCCAYCGDTITFQNCEMDHIVPRAGEGSTNTRDNLVAVCHRCNLAKKNIPFAVWAKNANIPGVSLKEALNRTRHWVEDTGMSSKDFQRFVSNVRARLKRTSVDEPLDNRSIESVAWMANELRSRVAQHFGEYGTKVGVYRGELTAEARNAAGIRRKLRFIDGTGKSRLDRRHHAVDAAVICFTQNYVAEVLAKRSSMRRAAQLNREPEQWREFTGSTDAHRAAWNAWVNKMHLLANLLQTALDEDRIVVTSNLRLRLGNGRAHEDTIGELKKIRVGDAISVTDIDRASTEALWCALTRDPDFDPKEGLPENPHRRIRIHGTWYDADDHIEVFPVGAGAIKVRGGYAELSRFHHARVYKITSGKKPTYAMLRVYTTDLTAYRNEDLFSVEIKPQTMSMRQAEPKLRKAIAEGQAEYLGWIVIDDELLIDTSSFNSGQIAEMQAEFGMVRRWRLDGFVSPSKLRLRPLQMSGEGLAPGASAGSRKIVDQPGWRPAVNKLLSAGNVTIIRRNSLGQVRLNSNAHLPTTWKVD

SEQ ID NO: 135 - protein, 1372 aa, Legionella pneumophila
MESSQILSPIGIDLGGKFTGVCLSHLEAFAELPNHANTKYSVILIDHNNFQLSQAQRRATRHRVRNKKRNQFVKRVALQLFQHILSRDLNAKEETALCHYLNNRGYTYVDTDLDEYIKDETTINLLKELLPSESEHNFIDWFLQKMQSSEFRKILVSKVEEKKDDKELKNAVKNIKNFITGFEKNSVEGHRHRKVYFENIKSDITKDNQLDSIKKKIPSVCLSNLLGHLSNLQWKNLHRYLAKNPKQFDEQTFGNEFLRMLKNFRHLKGSQESLAVRNLIQQLEQSQDYISILEKTPPEITIPPYEARTNTGMEKDQSLLLNPEKLNNLYPNWRNLIPGIIDAHPFLEKDLEHTKLRDRKRIISPSKQDEKRDSYILQRYLDLNKKIDKFKIKKQLSFLGQGKQLPANLIETQKEMETHFNSSLVSVLIQIASAYNKEREDAAQGIWFDNAFSLCELSNINPPRKQKILPLLVGAILSEDFINNKDKWAKFKIFWNTHKIGRTSLKSKCKEIEEARKNSGNAFKIDYEEALNHPEHSNNKALIKIIQTIPDIIQAIQSHLGHNDSQALIYHNPFSLSQLYTILETKRDGFHKNCVAVTCENYWRSQKTEIDPEISYASRLPADSVRPFDGVLARMMQRLAYEIAMAKWEQIKHIPDNSSLLIPIYLEQNRFEFEESFKKIKGSSSDKTLEQAIEKQNIQWEEKFQRIINASMNICPYKGASIGGQGEIDHIYPRSLSKKHFGVIFNSEVNLIYCSSQGNREKKEEHYLLEHLSPLYLKHQFGTDNVSDIKNFISQNVANIKKYISFHLLTPEQQKAARHALFLDYDDEAFKTITKFLMSQQKARVNGTQKFLGKQIMEFLSTLADSKQLQLEFSIKQITAEEVHDHRELLSKQEPKLVKSRQQSFPSHAIDATLTMSIGLKEFPQFSQELDNSWFINHLMPDEVHLNPVRSKEKYNKPNISSTPLFKDSLYAERFIPVWVKGETFAIGFSEKDLFEIKPSNKEKLFTLLKTYSTKNPGESLQELQAKSKAKWLYFPINKTLALEFLHHYFHKEIVTPDDTTVCHFINSLRYYTKKESITVKILKEPMPVLSVKFESSKKNVLGSFKHTIALPATKDWERLFNHPNFLALKANPAPNPKEFNEFIRKYFLSDNNPNSDIPNNGHNIKPQKHKAVRKVFSLPVIPGNAGTMMRIRRKDNKGQPLYQLQTIDDTPSMGIQINEDRLVKQEVLMDAYKTRNLSTIDGINNSEGQAYATFDNWLTLPVSTFKPEIIKLEMKPHSKTRRYIRITQSLADFIKTIDEALMIKPSDSIDDPLNMPNEIVCKNKLFGNELKPRDGKMKIVSTGKIVTYEFESDSTPQWIQTLYVTQLKKQP

SEQ ID NO: 136 - protein, 1039 aa, unidentified
MIYSANSMAQVEGDVKNRMRKYILGIDLGVNSLGAALIDSENQAIVWTGVRIFSGPFEGDYSSGIEESRARQRRTKRQLRRQIDRRRRRLQRVFTLLQRFGLLPSGERRTVLPALDAELRKRYPETETLPYFLRGRALDVKLEPFEIGRCLYHLAQRRGFQGRTAFADPEEKSGGKFGDEMKGLWNEICSSGARTLGEFLARQPAREVRLRGRHTHRLMYEQEFNLIWDAQKQHHPEILTPEHKALLFQALFFQRPLKSVTHLIGDCSLERGEKRAPCWTLQVQRFRVLSAVNNLRVVEPSGKIRPLEPQERELLAAESLRREQLKFSTIRRILKLDKDCRFTVEEGGEDCIPGNATSARIYKVMGDEWLKWPQDRQEALVAILGDTSRYPTDDDLVKELVTALGLPPENATRLCAVALPTGYASISLNAIAKVTPRLEKGMTFAEARRILWPEDFTEKPPLALLPPVCDTDLKRELRNPAVLRALSELRKVVNAVIREFGKPVSIHIELSRDLKRNRKERQQESERMRSRERARSQARTALAPYYGENVPNREIEKYLLWEECGHRCPYTGEVVALSDLFGPYPRFEVEHIIPFDRCLDDSFQNKTLCEINKNREKGKRTPWEAFGHTPEWPSMVERVRAFGNSAKLRRFIIRETEAERLLEEFSSRQLNDARYASRLAARYLGLLYGIQGSDNRRIIVCAGAVTAYLRQEWDLNRILSAQPVKSREDHRHHAVDALAVALATPAQIKALAECASRAPQVGRRRFAPLPDPWPGFRDQARRAILGTLVSHRPQRKLKAALHEDTYYSPPVERDGKLSVRCRKPVNSLSANEINAIVDPTVRETVRKAWEEVGRDSKKLLNNWPLLQTRRGDLVPIKRVRYYKTQQVQPIAAEDPARTRYVIPGGNHHMEIWAVLDRSTGKPIKWASETISVLEAHRRYRQGSPIIQRDHGPDTRFCFSLSEGDLVKTRRSERDSERIWYVRSVKADGRVVMSPATDARKKEDISKSGELWQVSVNPLMRLGAAKVVVTPLGKVIYAHD

SEQ ID NO: 137 - protein, 1354 aa, unidentified
MSTKKIVGFDLGTNSVGWAVVENSDENAAKIAGAGSRILPLDPKILDAFENGQKLTKNAERRQKRSQRKTLDRYQLRRKYLIESLIIMGCLPEDFTPQNAGRKFKELIEKPDELKNLPDDWYVYMLRSKALKEPVTQIEFGRILYHLNQRRGYKDIGELMEEIEEKDDTKQGKKYDKWIEQVTIYSVEKKSDLKNKKQEYWVILDDGREGTSIIANIESLTGKEIELEIRRRVKKNSEETFEFALPNRNDWQNKLDALDKQISQSGMHVGEFFWNKIKEDRYFRIRQNFVHREKYIEEFDAIWEKQQEFIPALIDETVKQDVIQRIVRNEKERQKWAKKPLKEFIKNYIIYYQRPLKSQKSKKANCRFEPMIKVINQSTGESLSIENKCMPLSSPLYEEFRIWQKLNNLRYKDINNKNYELTNEQKEALFEKLNNGQTLKESSIFKILGLDKNLYSDFNFDQIEGHTVKSKIASVLKDYDSGKIIGNEEFLYKVWHLLYSVNETEYRKNTLIKWFNLTEEDAKRLAKVRFEKKTGSLSSRAVKKLLPLMRAGKYFDEQSLHDSILFRINNIINGEFDPDVTDDIREFFKEYKSIRDFSGMPYWKAATLVYGSHSTGFSDTRYEKPEEIQLIPAGELRNPVVEQVINETLQIARDIWIKYGKPDEIHLEMAREMKMNSNERQKLTKAMRDQQKKNEEYEEILKKEFNILKPSRTDIIRYRLYIDQKQRCLYTGKPIQKTQLFNGETDIDHIIPRQRYFDDSYNNKVLCFRNVNEEKSNMTSYEFMQQKGIDKWEDFTRRVNELYKEGLISKKKKNYLLSDEIPKDFINRQLNETRYITRRVKEELEKISPVVTTVGSITDYLKEDWKLNKVFKEVQLGRFRSIEKKIDKKLIQEIRINGYHDYQIEGWDKRIDHRHHALDAITIACTNRSIIQTLNNLAQLYESSEPIKNKISRHFPVPAPDFRDQVKNTLETMIVSHKSRRRLITKKRAYYKVLDPSTGAYILKKQEKPSPVVRGPLHDEQPLGEIKEYQKIKIKDAIKKLEENKNNLDKFINGTFPIEWQRKKINEKLSIYNNDPKLFLKNLNKDAILNLKGEKLEYITILVRKYVKSRDLNTSITLSQIENIIDRKLKNEIKNHLKQYNNDPKKAFTDEGLMLFNQNRKFPVYKVRCKVDESEVGTLTTREPLERDSENNPKLHIEKGENYGFVIYENKETGKREYETISFYDAISLARMGLSIVEARPGYRHCVLKHNELIYVLRPGEEKKLINWNDYKNLNNRIYRIVKFTNKRLYAVPHQVAENIVLNEEYENFNEFGSNKNCLEIISDDEPKTKISERCIKINADRLGNIKPAPWEND

SEQ ID NO: 138 - protein, 972 aa, unidentified
MKTLGLDLGIKSVGWALIESDENRENYRILDLGIRLFSSGQAIENGKVVGPPALPRREARSSRRTIRRKRARLIRIKKFLHNYGLIKNIKDLFYNNKITDVWELRALALNEPLSPEDFSRILIHIAKHRGYMMSVDSDDDEIDGDKDGKKDDKKKIKKAIAETERAIKELNYRTYGEYVYKSALDSKKPMRNRGGEYRYFPSNNLLKKEIDIIFKKQFELGNKFATEELKNKYWEIASSIKDSKSFEDMVGACTFFKDEKRAPKNCYSAEKFVLLTSILNTVVIDEDLKEIKIINIKHIDEIINFAENEDGGISYKKLRKFLSIPDTAMFKGISYEKKKKAKGKKETDPEDKVFVNMYGLNALKKICGEKIAKDKGLSLKIMRVLTYFKGVEQRRSKLLEIEELNADMASQLAKLENIKEFVSLSAKAIEILLPYMESGLRYDEAVKTARIDGKIPYEENLKQDLLPALDPKTNIRITNPTVLRTLSEARKVINAVIRKYGKLDRVNIELARDIKTKKERLKAIQTQNKNIESKKQAEQLLKEKDLNNPSPKKDISKKDILKARLYNQQDGISLYSGEPIKLERLTEDGYCQIDHILPRFKSMDNSFNNKVLCLAEENQNKANDIPYDWLSKTGQFDEFKARVLSMKDKLSYQKVKRLLTEKIDAEGFIERDLNDTRYASRTLKKYLETYLKIGEDDNKVKVLAVNGYLTAELRHQWGLEKDRDANDIHHAVDAVVIALANAGIVKKLANYYKEREYRKHPKFTEPLENFRKVLNEKLVNLPVNRLLVSRPPRKKVTGQAHKETVISPKNKDHSMIEIHKGRGYAEQSLMPRVDVFKKGGKFYYVPIYVADFAKKELPNKIITIGKEKNEWNVADDSYEFLFSLFKDDLIKFKQKGKAEVMGYFLNIGISNCQITYQNINGSKEKNSKGKEFDPYFGGTTLEYIKKYQIDPLGFYYEIKKERRLPVSMKKNN

SEQ ID NO: 139 - protein, 1046 aa, unidentified
MKYSLGLDIGITSVGWAVLNLDKKRVEALGVRGFNAAEDPKTWASLALPRRLARSARRRLRRRAGRLRRARDLFIKYELIQAQEIKSAFETVLGQPSPWELRAEGLDRLLTGQEFARALFHIIKRRGFKSNRKAAKSSEDGKMIAGIEANRERMREKGFRTAGEMYWSDPFFDLRKRNTTDSYINTVDRGLLEEEIKTLFKRQRELGSVFTKHEFENAILEVFSWQKPYVSGDDIIRMVGTCTFEPNELRAPRYSYHAERFLLLQKINSTTYSTNGDKERFTPEQRKVIEGLAYKNVRVTYAQIRKALDLPEEARFAGLTYLRRPEKKAELVESLECENTVFFELKGYHSIQNACSVDGMWDRVKQNPELMDNLATALTFYKTDEDIEEWLTERGVEKEIINAVSGCEFTKTANLSLVAIKKILPHLEEGLHYSEACAKAGYNHTGLSGEKKKDKLPSIPVDMIRNPVVLRALSQARKVVNAVINRYGSPYAIHIEFARDMGKSADKRKEEERRQRENLKEREELEEQFRETFDGREPNGTDMLKWRLYREQRGCCAYSLQPIDLNRLCEPGYVEVDHILPYSRSFDNSRANKVLVLISENRNKLNRTPYEYFGHNEKRWSEYEGWVRTTIRDPRKRGNLLRESFEERQEVEWKDRNLNDTRYVAREFAGFIRANLLFADPDNKLPLVCINGQVVAQARWLWGLYKDRDENDLHHAQDAAVIAALLPYQIKMITEYSKVVETRRNHIDPETGEIIEWKENERPRLPEPWKGFRKEGVEKLGSILVSRMPQRKVSGAIHADTIRSAKHISTDRVSVVKKPLNSLSENDLKNLFDTEHNKLLYSAIRQRMAEFDNKAQKAFAEPLFKPLRDGSPGPMVRSVKVCQAQYTGVNVRGGIADNGDMVRTDVFRKQNKKGKWEYYLIPVYTVDMISGKLPDKAIAAHKPYNEWPVIDNEYEFLFTLYPYDLIRVETKDGGGLYYYRSSHRANGSLIVCNVNKADTTFGIGSRTAISIEKLEMGVLGDYFPVHKEIRRGLENGSHLEPDKIES

SEQ ID NO: 140 - protein, 1094 aa, unidentified
MTVRYRLGLDLGTNSIGWAAVALDAEGRPGRLLDGGVRIITPNDEAGRDPKSKASLAAGRRAARAMRRRRDRFLRRQKRLMEILTANGLMPADTAARKELEKLDPYWLRARALAEPLTLHEIGRALFHLNQRRGFSSNRITDADDAEGGAMKQGMAQLQEALEQAGARTLGEFLAKRHRRDREGYRVDPSGQRISKANGNDREASKGVRFRPHAEGSKLLYDFYPTRDMVAHELRQVWVEQAKTHTELTEPLREQLEHVIIAQRPLKKPRVGRCTFRPDEERAPRALPLFQRFRILSELAALEIERPGRPARKLTIPERDLLANLLGSQTSPVSFTKMAKALKLPDDADFNLARGGRKGLDPDKTAAILAKTGKGESFGKGWRSIPFDRQSEIVQRLLNEPDEDALISFLIEECDLSDEQAQAASSARLPQGHGHIGPSMLEELVDVLQNDSVEVVDPQTGEILPRPLTYDQAVVRLGSHHSHFTGERRERLPYYGEVLARHVIANPDAPEGSQERIGRVPNPTVHIALNQTAKLVNALIEAHGRPDEIVIELARELKQNRQQKDEAIRQNRSNETERARMREELASLGYADTPGNMLLLRLYFELPPDERVCVYSGEPISKEMLFSGAVDIDHILPRSKTLDDGFANKVLCTREMNRRKGNRAPADAWSAEELLIIHERSKRLFPRKAWRFAPDAMEKYAENNDFLARHLTDSQHMARLAKTYLGTLYGEDAAKRVWSTPGRLTAMLRGMWGLNGLLKDHNRAGADGADVKNRDDHRHHFLDAFVVACTDRGTLQRVATASARAEAMEIDRWAEKGAFPEPFEGYREQISDRIGTMVVSHKPDHGITPGRARERQATSGQLHEDTAYGRVDEQVNGKTYNLVTRKPIGALTKNEIGQVRDVRIREALQEVAYEADRDGIKLGEALARFGEENGIRRVRVLKTDKTAIALTHGDGRFHKTYVPGDNHRLEIFVAPDGNWTGEAVTVFDANRKDFTPAWQSMTPRPALIMRLHKGDLLEADFGEGRCIWRVVRLEPSAKRVRLVRDFDAGAYEERHKDAEDPFRWNFASYARLQAAAATRVRVDPIGRVLPAREH

SEQ ID NO: 141 - protein, 1037 aa, unidentified
MALIFAFDIGTTSIGSAVINHDPGRKIGKILRLGVRIFPETREPKTNAPLNQQRRAKRMMRRQLRRRRARRRTLNEALSSAGLLPAFGTSQWDRLMRLDPYDLRSRGLTEALEPEEFGRAIYHLAQRRHFRGRDIESESEDDNADSEELAARAEAKDMLATLRQSGMTLGQWLNQIESGKRKRGIHAARSTVEDEFERLWAAQEAHNDKLKDPEFQSSIRKIIFYQRPVFWRQNTLGSCPLIPGAELCPKGSWLSMQRRMLEKLNNLELVGAGARKLDPEERMAILESLQSQASMSWAGVRKALSSIYRNRNLTGEEKRLKFNLEIGGEKGLIGNPLEQRIAAIVGKSWSAHPHKQKIREALHERLWKADYRKIGTQRVVIQPQKKRRLDRLNAAESIVKEFELPGDLIQPISEISFPSGWEPYSIDALLRIIPELENGTRFGELLVGPELEDWRTKTFPDRIRPTGQISDRLPSPSDPDENRRLRSIRNPTVVRCQNELRKVVNNLIDVYGKPDIIRVELARDVGRSKRDREEFQRVIRQRETERKAAIRDLETNGIVQPSRSDIEKWLLWKESGQICPYTGDAIGFDDLFRTGRFEVEHIWPRSRCLDDSFANKTLCRSDINKEKGNRTPYEHLGSNTDQWHRMQDRLKGMVRKGKKPGMAFSKTKRFLAKEIPDDFTHRMLNDTSYAARESVNMLKQLWPQGGANMPVTVQVVSGRVTAQLRRLWGLNNLLHDGAEKTRADHRHHAVDALVVASCNPGITQSLSRYWKLRESPSAETHPIPLPWPEIRQDATQALDKVIVSHRVSRKLSGPLHEETHFGDTGLEAVRRGTIYRQYVRRKPLHELSPKELDCIRDPAVQSIVRKWVNARGGDPKKAFSDGYPKLGTNGPEIKKVRLVVEKRPELTIHTGSGVVDKGKNHHLAVYRNEEGKLLFRIVSLNEARTALAELGHPVAKTEASAKLLFSLSAGDCLSIPDGDETKLWIVSSTWAEGRVTISETHDAAGQTKTNPSILALVRKGALKVSVDPIGRVRPARD

SEQ ID NO: 142 - protein, 1525 aa, unidentified
MTKILGLDLGTNSIGWAVVDKENNKIDNCGVRIFPEGVVNMNEGEEREKSKNALRRENRQTRRQVARRRMRKIKLLELLIEQGMCPLTNEQLMIWKHWDKNKKSEGRHFPHTKEFIEWLRLNPYELRYKGINGELTKMEFGRFLYHIIQRRGFLSTRKEKETGKIYAGKENMVGIDDTKTELNGNTLGEYLYTIYPEENESYKNIQNEEGEDVRIRGRYTLRDMYVEEFEKIWQNQASRLGLDKVSVIKQKVVFLNGSKDRNRNAKKIKYLKNNRDKIEVQEIIVEREKANKTLTRVTSYENIPLHDHLGGNIEISDDKIKFDNKDSVLFYQRPLRSQKSLLGKCRYEKNKTPVSVSHPDYELFRAWQYVNTIKFGNNIPLPIEQKSAIVEFLRTKKTSVKFADIVKLLNMSHENFNYNYDDKVEGCPSIAQLSKLFSNEGWENNYHNIWHDFYFFDDSEKLFKKLANTKEYKMKNVIKIDDIKKVSIKDDKYASLSLKAVRNILPFLQRGLMYNQAVFLGGVMNAFNYKALSDEIARWDRFADYHDTIIKDILSIIKERNKEGEAIQKVKEYLSDPANHYGFEKESPAFKKLYHHSQEIEEKEMSDKLSEIENLRNPIVQRAIQEMRRMINELIEKYGKFDRIAVEMGREMKLSKKGRQNVSRMIHQNFEANENVREILKDYQLAPSRQNIQKVLLFNEIQEKAGKVVCPYSGRTLNISDLLGSENKVQIEHIIPRSFSQDDSFTNKTICDAKFNQLKGNLTPYQFYQQNNNKTLWGAATWEEVEQRAYSVLPFNKAKRFTTRKTEWKTEEFISRQLNDDRYISKKTKEILSEVCNEILVMPGAVTADLRRLWGLNNILQPTIGLPDDEFNIDREKDINYWAVTDENRKIKKLYPMNNLRPDAAAEETVVAGYVTKNKFKAQRLNLEFDAPDISDGKYYVKFHVSKPVKTLRQYVDKPEYGENEIILRGVINRNKFNHDSLKRKIDAPKNIDDGSYWAKFKIVDKRFEEPEKNKRPENKNGICLFGKVKDNVFTSYIYQCETNLEDGHYWVLLDLDFEHVEFVATKNEKPDIENNQLLVLGDLNQEGTFTALHDIQLQFDWNDKPGRYWAVLNILPDIPEFTAVENEPPEIEDDEKLIEGKIWVDHKTGEIRFDPKKNRDDHRHHAVDAITIALTDYNNINQLNWYNAQKDKLEKGIPTERPSFDEPWENFFSDAREAAGKILVSHHKDNTVTKKVTMIIEKNGKKFRSEGQAVRGQLHKETVYGKRTPPRAEQAFHVRKPIESLNDKQLDKIVDDNVRSIVKYGREREKFIKEQIKALQKDRTKAGDEEEKKIDQQIKSLEEENRQLYTLPNKNGDRVPIKKVRIRENLGNTEMLKPSENINQYVNPRNNHHVMIYKDSDGQLKESIVTLWEAAERKNQGNSVYQLPPDGLEVVSTLAVNDMFLLGLETEQNKDIKKLDYQILSKHLYRVQKLSSMYYTFRHHLASTVTNSDEEFSIRSFGTWEKVNPIRVKVNQIGEVIRSL

SEQ ID NO: 143 - protein, 978 aa, unidentified
MSKMILGLDLGITSIGWALVNVDDEDAQNNKIIDSGVRIFTIAEHPKDGKSLALPRREARGARRTTKRKAQKIKAVKRLLIKEKVVTANELNNLFIGNKKQKDVWDLRREALYRELNNKEFARIMVHLAKHRGYASNRKSEEPTDSEGKAVLSGITHNKTILQEKSYLTIGEYISTKTKKRNGKDTEGKLNYENSVSREMLINEITTIFERQKEFSNPHAKEELLEEYKNIAFTQRALKSVEGMVANCPFETNKKRAPKASSTFETFRALQKLKNLRMISNEGESALTKEQILQAIQKAKTAKSFTYKTLKTLFALPKEVQFKGLTYFDHKTGEAKEPESAKLLDFSAYQKIKDAIQSSDNLYWNKIEESVNLLDEIAKILSTHKDDKKSLEELNKIIDNPSVCNALISLSFSGFGHISVEAMRKINPYLLEGIDYDKACEMAGYDFKAIFKGDKSTLLPPLSEQENLEMTNPVVKRAIAQMRLVYNAITRKYGAIDAVHVEFTRDIKKSHKDRNDIKKSQEEFQALKEEAKAEAIKILGKEPSAKELLKFRLWKEQNGECIYSGAYISPSILADPYATEVDHILPYSRSLDDSLNNKVLCLTKQNQDKGNKTPFEYFGADKDSKEWQEFTGRVEGLKNIKGAKKGRLTKTNFDESSENAFKERNKNDTSYISKFVKNYIESHVEFKESKMKRHVYTMNGMLTSQLRYKWGVGDKNRENHLHHAEDAIILAFATQAQVQKLSTTSAKREGFSFKNKEEKAKELRFEPPMENFNEKVKESIENIFVSHMPRRKVSGSAHKETVYSNKTHSVKKADGKVEYLKGNSVNNNVKLKHGIALNDSMPRVDLFQNKKTNKYYLVPIYVSDFVQETLPNKAIVAGNKPWLEMDEEYEFKFSFYKSDLIEVKTKKTATKESVQVLGYFNTAVSSTAQVVIDTHDGNEEYRYGTQNLIFVKKYQVDALGNYIEVKNEKRQGTKKQNR

SEQ ID NO: 144 - protein, 1037 aa, unidentified
MFGKMRYRLALDLGSTSLGWAMVRLDKENQPCAVIKAGARIFSDGRNPKDGSSLAVTRRAARAMRRRRDRLLKRKQRMMDALIKHGFFPATAAERKALETLNPYALRAKGLDKALTPAEFARALFHINQRRGFKSNRKTDKKENDSGALKTAIQKLRESLQGENCRTVGEWLNKRDNSGQTVRARYRQEKHIKEDGKSKIDKYYDLYIDRAMIEHEFDELWSKQAELDPARFNETARAELKDILLHQRPLKPVKPGRCTFLPEEERAPLALPSTQRFRMYQEVNNLRILRDGLKEEPLTLEQRDTLIFALEENNKCSFTRIKKLLGLSGAVQFNFEDPKRQELKGNTTSAILGKKDLFGPDWFKFDETKQDAIVMKLLTEESEETLVRWLQNETGVDEKTAEAIANAGLPEGYGSLSAQALARILPELRRDVVTYDKAVKAAGFEHHSKLGSDTEIPSITFKTERIDLDTGEIKAFHIHDKLPYYGEYLQRHVGFGSGKPEDTPEKRYGKITNPTVHIGLNQVRLVVNALIQRYGHPSEVIVEVARELKQNHEQRKEESKRQAENQDRNKRLRSNIAGILKISEEQVSRDDIEKMILWEELSHDVADRKCPYSGVPISASMLLSSEVEIEHILPFSQTLDDSLNNKTVSMRQANRIKGNRTPWEAKQDFEAQGWKFDDILARAGNMKKEKRYRFAEDGYKRWLKDDAGFLPRALNDTRHLSKVAREYLTLICPQATRVIPGRMTAMLRGKFGLNDVLGLNGEKNRNDHRHHAVDACVIAVTDQGLLQRFAKASASAREKQLNRLVESMPLPWENYREHVQRAVGNILVSHKPDHSHEGAMHNDTAYGLRDGGKVSFHKMVDGKRERTEESLKVIKISDAKAIERHGVLPTGEPKPYKGYKGDSNYCIEIVRNEKGKWEGEVISTFDAYQLVRQHGIERLRHPSLSVSGKPLAMRLMKNDCVKLQLDNEIITSRVCWVRTDTRIAFAPVSEANVDARDRDKGDQFSYIIKTASVLQKLCARQITITPIGELHDPGFKV

SEQ ID NO: 145 - protein, 1028 aa, unidentified
MRIWGFDVGTTSIGFAVIDYDSDRKAGRIERLGVRIFPEGVTEDKGEPRNAQRRAKRMMRRQLRRKRWRRRALHEILAEAGLLPTDDPKQWPAELAQADPYDLRDRGLSQKLSPHEVGRALFHILKRRGFQSARIAAVEPSDPAKEKEDEGIKAEISQIAAELQGRTLGQWLKSQSKRRGHHTARTMTQEEFERFWTAQVKYHPDLLTDNLRAALAETAFRQRPIFWRLKTLGTCLLEKDAPLCPKGAWIGQRFEMLQTLNNLRLAGGNARPLDEDERRLLLAALETSPSLSFPAARKLLKPVWQRNGTSLKTKFNFEVEGGKKALPGNALEAALIDAFGEAWNTHPKKDAIRAELQDRLWAIQYRKLGEKRVEIRDGNSAEAERQRFIAFAQAEWNASRKTAETLSRIEPPAAWLRHSIKAIQKLLPHMEAGLTYAEARKLVYPEQFEKSDPIEKLPSDPRQFEDLRNPTVKRALTELRKVVNNLLATYGKPERIRIELARNVALTGKDKANYMRTLAERERQRKQAAKELKASLGREPTAGDIEKWLLWQECEKTCPYTFDSIGFADLFGNMPRYDIEHIWPRSLSLDDSFANKTLCRRDVNNKKGQRTPFELYASNHGIADLPDWEEVKIHLRNKVDAGHFPESKWKRFTREQPFAAADDRSDDRLIGDTAYIAREARAWLGQLMPRGIFDVEPRNGRIVSRLRKLWHLDRLLGEDGRKNRDDHRHHALDAAVTALFDTRAMQDIVRWYKAQEDRPEEKPPAIDLPWPAFRDDLRTALEAIVVSHRVRRKVNGPLHDETRLGDSGEPPIREGGKEYRFYVKRKALAQMSKGEIDAIRDERIRTLAQERLAAHDGDVKKAFATPLMLPGRAGKPDREVKKARVIVKSQPHLVTALNGGKAYAAASDNHHMAIYRSIDGKVSYRTVSRIEAARRTARKEPVVQRVLPDGAQLLFTLTPGTTLAFPNNNGRPIYRVVTSVWDSGQIVLVDHTEAGGTVWKRPNASSLVAMGAKKVSVDPIGRVRPARD

SEQ ID NO: 146 - protein, 1008 aa, unidentified
MLGLDIGTNSIGWALIDTDPTTGRAVGIRDCGVRIFQEAVDAKTRTPKNAARRSARLLRRLLARRARRKRKLMNLLIKYGLLPPEIAADDAKPEIILNALGDPYELRTKALDEPLQPYELGRVLLHLCARRGFLSNRKAHLVAYLAEEFSDYLAQIDDTDDAANSSASTEDLGKVKDGIKKLSEEIHVSGCRTLGEYLYRLDRHTRKRARFTSRQMYLDEFEMIWESQARYNPILTDDLKIQVHQVIFFQRPLKSQKSLVGKCLLEPGRKRTAKARLEAQQFRIWQDINHIEIQNPETRAWRRLTQEERQKLFHALHEKKSLSWSGVRKLLGIHRGERINLEEAKDKLIGNLTWIELSEALGDRWSRMSDTERQSLVEDLLTISDLTARARRLREHWKLSREEQYLLCTWEPQPGYTNHSLKAIRAMLPYLERGAIYSEARQAAGYKYEVLQLNKPLLGEPPYVRNPVAQKALYQVRRVVNAVIRRYGKPAQIIVELAREMKLSKKQKKALNKQNKRNREANQEAAEQVIRITGVEHPSYDDKLKYRLWKECGGVCPYTGKAISLHELFSDAVDIEHILPYHRTLDDSYMNKTICWADFNRNVKRNQTPWEVLGGDADAWGQLLQRIRSWPKAKRDRMERRSLDGIEDFINRQLNDTRLICRETLGYLKELGVEVCVSRGALTADLRHHWGLNALLSSSEDEKERRDHRHHAVDALVIALTTRRLLQTLSELSSKQGSRSLKDRLRVGLPWPSFREDAKLAIEKIVVSHAAARKIAGALHEETAYGCRKDGRYVYRKPLNGLFKREHAKDIVDPQIKKIVLEHLDRHGNDPKKAFIPENLPLLKDGAGFRPIKKVRVFAKHRPTSVFAVRDRHGRDFKFLKYGSNHHLEILENPSTGKREMRFVTTMEAAVRARRKNVPVYDRSAPAGWRFLMSLGINDMVEVNQDGGTDYYRVQKLDGGNRRFYLRHHASATTEAREEGLVVSTKSLPLIVRKLSVDPIGQISTAND

SEQ ID NO: 147 - protein, 1399 aa, unidentified
MKKILGLDLGTNSIGWAYVNEAENTNEQSSIIKLGVRVIPLTTDEQTNFEKGKPITTNASRTLARSARRNLQRYKLRRENLIQILKDNNWITDHTVLTENGNKSTFETFKLRSEAAERALELNELARVLLHINKKRGYKSSRKVNNTEEGQLIDGMDIAKKLYHENITPGEFVLELLKSGKKKIPDFYRSDLNNEFEKIWNNQAKYHPDIFTNSLKDELKGKGKQATWAILKDPLKLVGVKRDKKRDEIKLENYQWRVDALTQQLNFEQIAVVLQEINGQINNSSGYLGAISDRSKELYFNNQTVGQYLYSQLKANPHTRLKNQVFYRQDYMDEFEKIWEVQSKGREHIFTDTLKCEIRDVIIFYQRKLKSQKGLISFCEFEQKEISVGDKKKIVGLRVAPKSSPLFQEFKIWQNLHNVKIKNKNTKEVLVLNQDEKNCLFSELNVKGKLTANQVLKLIKGNPKDWEINYTELDGNRTNQALFDAYLSILEIEGYDVREELKLKLNKDDITLADIDKPAAEIMHMVETIFKHLKIDTNILHFNPLIEGNSFEKQASYQLWHLLYSYEEDNSPTGMETLYRLLGEKFGFNKEQAKIIANVSFQDDYGSLSSKAIRKIFPYIKESDFSTSCELAGYNHSKNSLTKEEIEKRELKTRLEILPKNSLRNPVVEKILNQMINVVNTIIDTENDKLEQDGKIRNFQFDEIRIELARELKKNAKEREDLSKAINTGKIEHDRIIKILQNEDGIKFPTRNDIIRYKLYQELKNNSYKDLYTNTYIERKDLFTNKYDIEHIIPQSRLFDDSFSNKTIVPRQVNLEKGNRTAYDYILEVKGEKAAEEYTQRIEHMYTQKEDGISKAKYKKLLMKESEIGSGFIERDLRDSQYIAKKAKEILFQITKSVVSTSGSITDRLRQDWGLIDVMKELNLPKYEKAGLVEIQHDKNGQPKKVIKNWTKRNDHRHHAMDALTVAFTKHSHIQYLNNLNARKNEDSEKKANIYAIEEKETVKINDGKGNSKRIFKEPILNFRDEAKKHLECVLVSHKAKNKVVTRNINKIKGSDKKQIALTPRGQMHKETVYGRIKQYNSKIEKVSAKFDEDTIAMVSNPQYRSLLLQRLKENGNDPKKAFTGKNALDKAPILLKNGTPLPDKVKLIWLEDNFTIRKEINPDLKIDKVIDEGIKRILQKRLDEFKGDPKKAFADLENNPIWLNKEKGIAIKRVTISGVKNAEALHTAKDHLGNKRLDKNGQEIPVDFVSTGNNHHVAIYEDEKGNLHEKVVSFYEAVARVNQGLPIIDKSYNKDLGWKFLFTMKQNEMFVFPSNDFNPKEIDLLDKKNQALISKYLFRVQKFSEKDYNFRHHLETQIIDTPQLNNIIAIRKRNPNSLKGVIKIRINHVGDIIQIGEY

SEQ ID NO: 148 - protein, 1124 aa, unidentified
MDSKKILGLDLGTNSIGWSLVEINREENQGRILGMGVRIFPEGVENLNQGEKEISKNAARNVNRSARRQIQRRKRRKTDLLKILIQYDMAPQGDFKDQAYWLSPEFLKWVALNPYELRHRAITEKIALKELGRVFYHLAQHRGFQSNARNVSDNDDSTIYKGGNGMTGIDTTASLIENETLGSALYQKLFPAPGQPFKYFPERIRRRYTTRKMYIDEFEKIWEEQSRFHPELTQQLNEEIGGRRREGYKRDGVLFFQRPLRSQKSKIGKCTFHPNKSRRAISAPDFEEFRIWQFINSIRCNGESLVDADRQLVYNLLVSQDRVKFDKLRKHLGKASAAYSFNFDDETSCPNAPTLRFLSSRGIFSQSWFGFKKSKQEEIWHDLYFYDDKELLRKRAQEKWGLSEDAATKFGDYSLKQGFASLSRRAIQNILPFLALGHDYDVAVTLGGIKNALGDQNIVDIYDTDFRIAVEEIVRTNPRGGYINHLKAWLKDNYGFEDKRLEKLYHHSADVNERKLLNRLPYGMEADRQIQQLRNPIVIQALFELRKVINELLERFGPFDEIKIELGRDLKNPKNRRLEIQRQNKRQQQYHEKVIDRLRELGIDETYDNVLKYKLWEECNATCPYTGRPIAVNQLFSNQIQIEHIIPYSRSLDDSFMNKTLCFSDENARKGDRTPYEYYHGVLGSEKWVDVKQRALSLFKNSRDFPNRYKKFERFVLTSTQDLEGFISRQLNDTRYISREAAEYLRQICPKVWVASGQLTARLRHLWGLNSIIDDKSNQKDRSDHRHHAIDALVVAVHTHRDLQLMSRLNRHGISPDSLADAFPFPWPGFRSDAETYVSNILVSHKTNHRVVSTRLTITRSKGKVFRNKSSAARGALHKETVYGKRKLLDGSYKYHVRKSLEDIKEKAQVDKIVDQKIKDLVRNRLRELGVDITMKKYKVPPGAFFSKDENGQILPLIWLPNNRGGKVPVYSVRINEELGNAAQLKSSQNQYVNPRNNHHILIYKSKNGILKEDIISFWVAAERIRQKSPVYQIPADCEEIIAILRKNDMFLIGWDISIPENSTEILSRHLYRVDNLSSLDYVFKHHLTDNDEEKVRIQSFKKWQELNPIKVRISSTGKVIGLV

SEQ ID NO: 149 - protein, 1358 aa, Acidaminococcus intestini; identical to SEQ ID NO: 129

SEQ ID NO: 150 - protein, 1384 aa, Coriobacterium glomerans
MKLRGIEDDYSIGLDMGTSSVGWAVTDERGTLAHFKRKPTWGSRLFREAQTAAVARMPRGQRRRYVRRRWRLDLLQKLFEQQMEQADPDFFIRLRQSRLLRDDRAEEHADYRWPLFNDCKFTERDYYQRFPTIYHVRSWLMETDEQADIRLIYLALHNIVKHRGNFLREGQSLSAKSARPDEALNHLRETLRVWSSERGFECSIADNGSILAMLTHPDLSPSDRRKKIAPLFDVKSDDAAADKKLGIALAGAVIGLKTEFKNIFGDFPCEDSSIYLSNDEAVDAVRSACPDDCAELFDRLCEVYSAYVLQGLLSYAPGQTISANMVEKYRRYGEDLALLKKLVKIYAPDQYRMFFSGATYPGTGIYDAAQARGYTKYNLGPKKSEYKPSESMQYDDFRKAVEKLFAKTDARADERYRMMMDRFDKQQFLRRLKTSDNGSIYHQLHLEELKAIVENQGRFYPFLKRDADKLVSLVSFRIPYYVGPLSTRNARTDQHGENRFAWSERKPGMQDEPIFPWNWESIIDRSKSAEKFILRMTGMCTYLQQEPVLPKSSLLYEEFCVLNELNGAHWSIDGDDEHRFDAADREGIIEELFRRKRTVSYGDVAGWMERERNQIGAHVCGGQGEKGFESKLGSYIFFCKDVFKVERLEQSDYPMIERIILWNTLFEDRKILSQRLKEEYGSRLSAEQIKTICKKRFTGWGRLSEKFLTGITVQVDEDSVSIMDVLREGCPVSGKRGRAMVMMEILRDEELGFQKKVDDFNRAFFAENAQALGVNELPGSPAVRRSLNQSIRIVDEIASIAGKAPANIFIEVTRDEDPKKKGRRTKRRYNDLKDALEAFKKEDPELWRELCETAPNDMDERLSLYFMQRGKCLYSGRAIDIHQLSNAGIYEVDHIIPRTYVKDDSLENKALVYREENQRKTDMLLIDPEIRRRMSGYWRMLHEAKLIGDKKFRNLLRSRIDDKALKGFIARQLVETGQMVKLVRSLLEARYPETNIISVKASISHDLRTAAELVKCREANDFHHAHDAFLACRVGLFIQKRHPCVYENPIGLSQVVRNYVRQQADIFKRCRTIPGSSGFIVNSFMTSGFDKETGEIFKDDWDAEAEVEGIRRSLNFRQCFISRMPFEDHGVFWDATIYSPRAKKTAALPLKQGLNPSRYGSFSREQFAYFFIYKARNPRKEQTLFEFAQVPVRLSAQIRQDENALERYARELAKDQGLEFIRIERSKILKNQLIEIDGDRLCITGKEEVRNACELAFAQDEMRVIRMLVSEKPVSRECVISLFNRILLHGDQASRRLSKQLKLALLSEAFSEASDNVQRNVVLGLIAIFNGSTNMVNLSDIGGSKFAGNVRIKYKKELASPKVNVHLIDQSVTGMFERRTKIGL

SEQ ID NO: 151 - protein, 1380 aa, Eggerthella sp.
MNLRHVGNYNIGLDMGTASVGWAAIDEQGELLHFKGKPTWGSRLFDSANTAATARMPRGQRRRYIRRRWRLDLLQKFFSEEMAEKDPEFFIRLRQSSLWPEDREGGHTAYHWPLFNDSDFNEKEYYEKFPTIFHLRQWLMETDEKADIRLIYLAFHNIVKHRGNFLQENNDSLSAQNANMRESLESFCIALEEWCDEKELTCSCDPQKLEHLFKEVKYRSDIRDGFAALLGLACSGENEVDVKAMAKEMGKAIVGYKADFSKIFTECDKEGSSFRLSDDEGPEAFLDICPDDGIALFEAIQMVYSSFILTGMLTEKGLSLSKISAYNQYGQDLESLKALVKEYVPNEYSSFFRGPTYSGSTEYDPSKAQGYTRYNLGPSKKGSGAKPMAYEDFKKSVEQLFANTNAINDERYKEMMGRFAEEKFLRRLRTSDNGRIPFQLNLEEMTAIIINQGKYYPFLLEQQEKLESLVRFRIPYYVGPLTRINARLDSKGNACFAWSKRKDGMDSASIKPWNWDEVIDKHASAQAFIERMTGTCTYLRGEPVLPRCSLLYEEYCVLNELNGARWTQDGDKFIRFDYKDRSDIIEELFKKRRGRIQYAAVADWMKQERSHANVHVSGGQGENAFESRLSSYHFFCNDVFGVDELPGSYVDMVEEIILWSTLFEDRSILREEIQRKYGDVLNEEQIKTICKKRFSGWGRLSRKLLCSLKAQTDNGPKSIMDILQEGDQNNGRVGRAMVFQEILHDEQLGFEQKIEEENTQSMLEGENLLIEDLPGSPAIRRSINQAVRIVDEIVGIAGHAPDNIFIEVTREDDTKKKGKRTTTRYSNIQKALEALKEEGAEALRELKTYKHNELDKRLSLYFMQNGKSLYSGIPLDIRRLSEYQIDHIIPQSYIKDDSYENMALVLPGENQSKADNLLISQDIRIKMKATWTALHKAGLMGDKKYNNLMNSSISDAKMKGFINRQLVETSQSVKLTQMMLSQKYPGAKVRPIKASISSQLRDACDLVKCREANDYHHAHDAYLACQVGRFVLKRHSSMFDNPIGMTKVIRDFVKRQGQEFKRNGKLPAYASRSGFIVQSFMRSGFDAETGELLRDDWNAPFEIARIKRCLNYRDCYISRMPMEDSGAFWDATIYSPKAGKKGALPVKQGLPVEKYGSYSREQFAYFFVYKAYNPKKKAYRLEFEAVPVRVASAVETRENALEEYAKSVAKQAGLEFVEVARPKVYKYQLIELGEDRLYITGKREVRNASQLAFSLDEIDLLKRLAEGEETSSEERERLFDVLIEKYARYAPRLARQLSVDSMSATFETLNAEEQLGILLSLVEIANGKRNMIDLSSAGGSKNAGCMNPTFSSELSSPGSNFTFIDQSVTGMFERRQRLEL

SEQ ID NO: 152 - protein, 1348 aa, Finegoldia magna
MKSEKKYYIGLDVGTNSVGWAVTDEFYNILRAKGKDLWGVRLFEKADTAANTRIFRSGRRRNDRKGMRLQILREIFEDEIKKVDKDFYDRLDESKFWAEDKKVSGKYSLFNDKNFSDKQYFEKFPTIFHLRKYLMEEHGKVDIRYYFLAINQMMKRRGHFLIDGQISHVTDDKPLKEQLILLINDLLKIELEEELMDSIFEILADVNEKRTDKKNNLKELIKGQDFNKQEGNILNSIFESIVTGKAKIKNIISDEDILEKIKEDNKEDFVLTGDSYEENLQYFEEVLQENITLFNTLKSTYDFLILQSILKGKSTLSDAQVERYDEHKKDLEILKKVIKKYDEDGKLFKQVFKEDNGNGYVSYIGYYLNKNKKITAKKKISNIEFTKYVKGILEKQCDCEDEDVKYLLGKIEQENFLLKQISSINSVIPHQIHLFELDKILENLAKNYPSFNNKKEEFTKIEKIRKTFTFRIPYYVGPLNDYHKNNGGNAWIFRNKGEKIRPWNFEKIVDLHKSEEEFIKRMLNQCTYLPEETVLPKSSILYSEYMVLNELNNLRINGKPLDTDVKLKLIEELFKKKTKVTLKSIRDYMVRNNFADKEDFDNSEKNLEIASNMKSYIDFNNILEDKFDVEMVEDLIEKITIHTGNKKLLKKYIEETYPDLSSSQIQKIINLKYKDWGRLSRKLLDGIKGTKKETEKTDTVINFLRNSSDNLMQIIGSQNYSFNEYIDKLRKKYIPQEISYEVVENLYVSPSVKKMIWQVIRVTEEITKVMGYDPDKIFIEMAKSEEEKKTTISRKNKLLDLYKAIKKDERDSQYEKLLTGLNKLDDSDLRSRKLYLYYTQMGRDMYTGEKIDLDKLFDSTHYDKDHIIPQSMKKDDSIINNLVLVNKNANQTTKGNIYPVPSSIRNNPKIYNYWKYLMEKEFISKEKYNRLIRNTPLTNEELGGFINRQLVETRQSTKAIKELFEKFYQKSKIIPVKASLASDLRKDMNTLKSREVNDLHHAHDAFLNIVAGDVWNREFTSNPINYVKENREGDKVKYSLSKDFTRPRKSKGKVIWTPEKGRKLIVDTLNKPSVLISNESHVKKGELFNATIAGKKDYKKGKIYLPLKKDDRLQDVSKYGGYKAINGAFFFLVEHTKSKKRIRSIELFPLHLLSKFYEDKNTVLDYAINVLQLQDPKIIIDKINYRTEIIIDNFSYLISTKSNDGSITVKPNEQMYWRVDEISNLKKIENKYKKDAILTEEDRKIMESYIDKIYQQFKAGKYKNRRTTDTIIEKYEIIDLDTLDNKQLYQLLVAFISLSYKTSNNAVDFTVIGLGTECGKPRITNLPDNTYLVYKSITGIYEKRIRIK

SEQ ID NO: 153 - protein, 1361 aa, Lactobacillus rhamnosus
MTKLNQPYGIGLDIGSNSIGFAVVDANSHLLRLKGETAIGARLFREGQSAAERRESRTTRRRLSRTRWRLSFLRDFFAPHITKIDPDFFLRQKYSEISPKDKDRFKYEKRLFNDRTDAEFYEDYPSMYHLRLHLMTHTHKADPREIFLAIHHILKSRGHFLTPGAAKDFNTDKVDLEDIFPALTEAYAQVYPDLELTFDLAKADDFKAKLLDEQATPSDTQKALVNLLLSSDGEKEIVKKRKQVLTEFAKAITGLKTKFNLALGTEVDEADASNWQFSMGQLDDKWSNIETSMTDQGTEIFEQIQELYRARLLNGIVPAGMSLSQAKVADYGQHKEDLELFKTYLKKLNDHELAKTIRGLYDRYINGDDAKPFLREDFVKALTKEVTAHPNEVSEQLLNRMGQANFMLKQRTKANGAIPVQLQQRELDQIIANQSKYYDWLAKPNPVEKHRASKPYQLDELLTFRIPYYVGPLITPKEQAESRENVFAWMIRKDPSGNITPYNFDEKVDCPASANMFIQRMKNTDTYLIGEDVLPKRSLLYQKYEVLNELNNVSIDGRRLGADQKQRLIREVFERHSSVTIKQVAENLVAHGDFAKRPEIRGLADEKRFLSSLSTYHQLKKILHEAIDDPTKEHDIENIITWSTVFEDAAIFKTELAKISWLDSDTIKALSNIRYRGWGQFSRKLLDGLKLGNGHTVIQELMLSNHNLMQILTDETLKTTMAELNQDKLKADDIEDVINDAYTSPSNKKALRQVLRVVEDIKHAANGQDPSWLYIETADGPGTAGKRTQSRQKQIQTVYANAAQELIDSAVRGELEDKIADKASFTDRLVLYFMQGGRDIYTGAPLNIDQLSHYDIDHILPQSLIKDDSLDNRVLVNATINREKNNVFASTLFASKMAATWRKWHEAGLISGRKLRNLMLRPDEIDKFAHGFVARQLVETRQIIKLTEQIAAAQYPNTKIIAVKAGLSHQLREELDFPKNRDVNHYHHAFDAFLAARIGTYLLKRYPKLAPFFTYGEFAKVDVKKFREFNFIGALTHAKKNIVAKDTGEIVWDKERDIQELDRIYNFKRMLITHEVYFETADLFKQTIYAAKDSKERGGSKQLIPKKQGYPTQVYGGYTRENTAYLAVVKTVEKKADVYRVVRIATSQVAALKEARAQSTVKERELLKKFLTTKFTKIGKNGKKAITPFDIVIPRVPREQLFHNKRYGFFMVNSDTLMHNYQELWMSRSDQQILSKLVKSAKTVENGQVGRLFENIVEQINKYFPLYDINQFRKKLDQSKDIFSKLPLEGNGTTSGKRETIQNILTGAGTGAKNGDLKNLGIKTPFGFLQVPSGIVLDDDTTLIYQSPTGMLNRIVRLSEL

SEQ ID NO: 154 - protein, 1269 aa, Mycoplasma gallisepticum
MNNSIKSKPEVTIGLDLGVGSVGWAIVDNETNIIHHLGSRLFSQAKTAEDRRSFRGARRLIRRRKYKLKRFINLIWKYNSYFGFKNKEDILNNYQEQQKLHNTVLNLKLEALNAKIDPKALSWILHDYLKNRGHFYEDNRDFNVYPTEELANYFGEYGYYKGIIDSKEDNDDKLEEGLTKYKFSNQHWLEEIKKVLSNQTGLPEKFKEEYESLFSYVRNYSEGPGSINSVSPYGIYHLDEKEGKVVQKYNNIWDKTIGKCSIFPDEYRAPKNSPIAMIFNEINELSTIRSYSIYLTGWFINQEFKKAYLNKLLDLLIKTNSEKPIDARQFKKLREETIAESIGKETLKDVEREEKLEKEDHKWKLKGLKLNTNGKIQYNDLSSLAKFVHKLKQHLKLDFLLEDQYTTLDKINFLQSLFVYLGKHLRYSNRVDSANLKEFSDSNKLFERVLQEQKDDLFKLFEQTDKDDEKILAQTHSLSTKAMLLAITRMTNLDNDEDNQKNNDKGWNFEAIKNFDQKFIDITKKNNNLSLKQDKRYLDDRFINDAILSPGVKRILREATKVFNAILKQFSEEYDVTKVVIELARELSEEKELENTKNYEKLIKKNSDKISERLEALDIAEDKIEDILKSPTKSYKVLLWLQQDHIDPYSQKEIAFEDILTKTEKTEIDHIIPYSISFDDSSSNKLLVLAESNQAKSNQTPYEFITSGNAGIKWEDYEAYCRKFKDGDTSLLDSTQRSKKFAKMMKTDTSSKYDIGFLARNLNDTRYATIVFRDALKDYANNHLVEDKPMFKVVCINGGVTSFLRKNFDKSWYAKKDRDKNIHHAVDASIISIFSNETKTLFNQLTQFADYKLFKNTDGSWKKIDPKTGVVTEVTDENWKQIRVRNQVSEIAKVINKCIQDSNIERKARYSRKIENKTNISLFNDTVYSAKKVGYEDQIKRKNLKTLDIHESAEENKNSKVKKQFVYRKLVNVSLLNNDKLADLFAEKEDILMYRANPWVINLAEQIFNEYTENKKIKSQNVFEKYMLDLTKEFPEKFSEAFVKSMLRNKTAIIYNVEKKVVHRIKRLKILSSELKENKLSNVIIRSKNESGTKLSYQDTINSIALMIMRSIDPTAKKQYIRVPLNTLNLHLGDQDFDLHNIDAYLKKPKFVKYLKANEIGDEYKPWRVLTSGTLLIHKKDKKLMYISSFQNLKDVIEIKNLIETEYKENDDSDPKKKKKANRFLMTLSTILNDYILLDAKDNFDILGLSKNRIDEILNSKLGLDKITK

SEQ ID NO: 155 - protein, 1377 aa, Streptococcus agalactiae
MNKPYSIGLDIGTNSVGWSIITDDYKVPAKKMRVLGNTDKEYIKKNLIGALLFDGGNTAADRRLKRTARRRYTRRRNRILYLQEIFAEEMSKVDDSFFHRLEDSFLVEEDKRGSKYPIFATMQEEKYYHEKFPTIYHLRKELADKKEKADLRLVYLALAHIIKFRGHFLIEDDRFDVRNTDIQKQYQAFLEIFDTTFENNHLLSQNVDVEAILTDKISKSAKKDRILAQYPNQKSTGIFAEFLKLIVGNQADFKKHFNLEDKTPLQFAKDSYDEDLENLLGQIGDEFADLFSVAKKLYDSVLLSGILTVTDLSTKAPLSASMIQRYDEHHEDLKHLKQFVKASLPENYREVFADSSKDGYAGYIEGKTNQEAFYKYLLKLLTKQEGSEYFLEKIKNEDFLRKQRTFDNGSIPHQVHLTELRAIIRRQSEYYPFLKENQDRIEKILTFRIPYYVGPLAREKSDFAWMTRKTDDSIRPWNFEDLVDKEKSAEAFIHRMTNNDLYLPEEKVLPKHSLIYEKFTVYNELTKVRFLAEGFKDFQFLNRKQKETIFNSLFKEKRKVTEKDIISFLNKVDGYEGIAIKGIEKQFNASLSTYHDLKKILGKDFLDNTDNELILEDIVQTLTLFEDREMIKKCLDIYKDFFTESQLKKLYRRHYTGWGRLSAKLINGIRNKENQKTILDYLIDDGSANRNFMQLINDDDLSFKPIIDKARTGSHSDNLKEVVGELAGSPAIKKGILQSLKIVDELVKVMGYEPEQIVVEMARENQTTAKGLSRSRQRLTTLRESLANLKSNILEEKKPKYVKDQVENHHLSDDRLFLYYLQNGRDMYTKKALDIDNLSQYDIDHIIPQAFIKDDSIDNRVLVSSAKNRGKSDDVPSIEIVKARKMFWKNLLDAKLMSQRKYDNLTKAERGGLTSDDKARFIQRQLVETRQITKHVARILDERFNNEVDNGKKICKVKIVTLKSNLVSNFRKEFGFYKIREVNDYHHAHDAYLNAVVAKAILTKYPQLEPEFVYGMYRQKKLSKIVHEDKEEKYSEATRKMFFYSNLMNMFKRVVRLADGSIVVRPVIETGRYMRKTAWDKKKHFATVRKVLSYPQNNIVKKTEIQTGGFSKESILAHGNSDKLIPRKTKDIYLDPKKYGGFDSPIVAYSVLVVADIKKGKAQKLKTVTELLGITIMERSRFEKNPSAFLESKGYLNIRDDKLMILPKYSLFELENGRRRLLASAGELQKGNELALPTQFMKFLYLASRYNESKGKPEEIEKKQEFVNQHVSYFDDILQLINDFSKRVILADANLEKINKLYQDNKENIPVDELANNIINLFTFTSLGAPAAFKFFDKIVDRKRYTSTKEVLNSTLIHQSITGLYETRIDLGKLGED

SEQ ID NO: 156 - protein, 1371 aa, Streptococcus dysgalactiae
MDKKYSIGLDIGTNSVGWAVITDDYKVPSKKFKVLGNTDRHSIKKNLIGALLFDSGETAEATRLKRTARRRYTRRKNRIRYLQEIFSSEMSKVDDSFFHRLEESFLVEEDKKHERHPIFGNIVDEVAYHEKYPTIYHLRKKLADSTDKADLRLIYLALAHMIKFRGHFLIEGDLNPDNSDMDKLFIQLVQTYNQLFEENPINASRVDAKAILSARLSKSRRLENLIAQLPGEKRNGLFGNLIALSLGLTPNFKSNFDLAEDAKLQLSKDTYDDDLDNLLAQIGDQYADLFLAAKNLSDAILLSDILRVNSEITKAPLSASMIKRYDEHHQDLTLLKALVRQQLPEKYKEIFFDQSKNGYAGYIDGGASQEEFYKFIKPILEKMDGTEELLAKLNREDLLRKQRTFDNGSIPHQIHLGELHAILRRQEDFYPFLKDNREKIEKILTFRIPYYVGPLARGNSRFAWMTRKSEETITPWNFEEVVDKGASAQSFIERMTNFDKNLPNEKVLPKHSLLYEYFTVYNELTKVKYVTEGMRKPEFLSGKQKEAIVDLLFKTNRKVTVKQLKEDYFKKIECFDSVEISGVEDRFNASLGTYHDLLKIIKDKDFLDNEENEDILEDIVLTLTLFEDKEMIEERLKKYANLFDDKVMKQLKRRHYTGWGRLSRKLINGIRDKQSGKTILDFLKSDGFANRNFMQLINDDSLTFKEAIQKAQVSGQGHSLHEQIANLAGSPAIKKGILQSVKVVDELVKVMGHKPENIVIEMARENQTTQKGQKNSRERMKRIEEGIKELGSQILKEHPVENTQLQNEKLYLYYLQNGRDMYVDQELDINRLSDYDVDHIVPQSFIKDDSIDNKVLTRSDKNRGKSDNVPSEEVVKKMKNYWRQLLNAKLITQRKFDNLTKAERGGLSELDKAGFIKRQLVETRQITKHVAQILDSRMNTKYDENDKLIREVKVITLKSKLVSDFRKDFQFYKVREINNYHHAHDAYLNAVVGTALIKKYPKLESEFVYGDYKVYDVRKMIAKSEQEIGKATAKRFFYSNIMNFFKTEITLANGEIRKRPLIETNEETGEIVWDKGRDFATVRKVLSMPQVNIVKKTEVQTGALTNESIYARGSFDKLISRKHRFESSKYGGFGSPTVTYSVLVVAKSKVQDGKVKKIKTGKELIGITLLDKLVFEKNPLKFIEDKGYGNVQIDKCIKLPKYSLFEFENGTRRMLASVMANNNSRGDLQKANEMFLPAKLVTLLYHAHKIESSKELEHEAYILDHYNDLYQLLSYIERFASLYVDVEKNISKVKELFSNIESYSISEICSSVINLLTLTASGAPADFKFLGTTIPRKRYGSPQSILSSTLIHQSITGLYETRIDLSQLGGD

SEQ ID NO: 157 - protein, 1371 aa, Streptococcus gallolyticus
MTEKNYSIGLDIGTNSVGWAVITDDYKVPAKKMKVLGNTDKKYIKKNLLGALLFDNGETAEATRLKRTARRRYTRRKNRLRYLQEIFAEEMAKVDESFFYRLDESFLTTDDKDFERHPIFGNKADEIKYHQEFPTIYHLRKHLADSHEKADLRLIYLALAHMIKFRGHFLIEGELNAENTDVQKLFEAFVEVYDRTFDDSNLSEITVDASSILTEKFSKSRRLENLIKHYPTEKKNTLFGNLVALALGLQPNFKTSFKLSEDAKLQFSKDTYEEDLEELIGKIGDEYADLFTSAKNLYDAILLSGILTVADNTTKAPLSASMIKRYNEHQVDLKKLKEFIKNNASDKYDEIFNDKDKNGYAGYIENGVKQDEFYKYLKTTLSKIDGSDYFLDKIEREDFLRKQRTFDNGSIPHQIHLQEMHAILRRQGEHYAFLKENQAKIEKILTFRIPYYVGPLARKNSRFAWAEYHSDEKITPWNFDEIIDKEKSAEKFITRMTLNDLYLPEEKVLPKHSLVYETYTVYNELTKVKYVNEQGKSNFFDANMKQEIFEHVFKENRKVTKDKFLNYLNKEFPEYRIQDLIGLDKENKSFNASLGTYHDLKKILDKSFLDDKTNETIIEDIIQTLTLFEDRDMIRQRLQKYSDIFTPQQLKKLERRHYTGWGRLSYKLINGIRNKENGKSILDYLIDDGYANRNFMQLISDDTLPFKQIIKDAQIIGDIDDVTSVVRELPGSPAIKKGILQSVKIVDELVKVMGHNPDNIVIEMARENQTTNRGRNQSQQRLKKLQDSLKELGSNILNEEKPSYIEGKVENNHLQDDRLFLYYIQNGKDMYTGDELDIDHLSDYDIDHIIPQAFIKDDSIDNRVLTSSAKNRGKSDDVPSLDIVHDRKADWIRLYKSGLISKRKFDNLTKAERGGLTENDKAGFIKRQLVETRQITKHVAQILDSRFNTERDENDKVIRNVKVITLKSNLVSQFRKDFKFYKVREINDYHHAHDAYLNAVVGTALLKKYPKLAPEFVYGEYKKYDIRKFITSSGDKATAKYFFYSNLMNFFKRVIRYSNGKVVVRPVIECSKDTGEIAWNKQTDFEKVRRVLSYPQVNIVKKVETQTGGFSKESILPKGNSDKLIPRKTKKFRWDTPKYGGFDSPNIAYSVFVIADVEKGKAKKLKTVKELVGISIMERSSFEENPVVFLEKKGYQNVQEDNLIKLPKYSLFEFEGGRRRLLASASELQKGNEVVLSRHLVELLYHAHRVNSFNNSEHLKYVSEHKKEFGEVLSCVENFAKSYVDVEKNLGKIRAVADKIDTFSIEDISISFVNLLTLTALGAPADFNFLGEKIPRKRYTSTKECLNATLIHQSITGLYETRIDLSKLGEE

SEQ ID NO: 158 - protein, 1136 aa, Streptococcus gordonii
MNGLVLGLDIGIASVGVGILEKDTGKIIHASSRLFPAATADNNVERRSNRQGRRLNRRKKHRSVRLQDLFEGYGLLTDFSKVSMNLNPYQLRVQGMENQLTNEELFVALKNIVKRRGISYLDDASEDGGTVSSDYGKAVEENRKLLAEKTPGQIQLERFEKYGQLRGDFTVEENGEKHRLINVFSTSAYRKEAERILRKQQEFNSKITDEFIEDYLIILTGKRKYYHGPGNEKSRTDYGRFRTDGTTLDNIFGILIGKCTFYTEEYRASKASYTAQEFNLLNDLNNLTVPTETKKLSEEQKKLIIEYAKSAKTLGASTLLKYIAKMIDASVDQIRGYRVDVNNKPEMHTFEVYRKMQSLETIKVEELPRKVLDELAHILTLNTEREGIEEAINSKLKDIFNRDQVLELVQFRKNNSSLFSKGWHNFSIKLMMELIPELYETSEEQMTILTRLGKQRSKETSKRTKYIDEKELTEEIYNPVVAKSVRQAIKIINEATKKYGIFDNIVIEMARENNEEDAKKDYIKRQKANQDEKNAAMEKAAFQYNGKKELPDNIFHGHKELTTKIRLWHQQGEKCLYTGKNIPISDLIHNQYKYEIDHILPLSLSFDDSLSNKVLVLATANQEKGQRTPFQALDSMDDAWSYREFKSYVKDSKLLSNKKKDYLLTEEDISKIEVKQKFIERNLVDTRYSSRVVLNALQDFYKSHQLDTTISVVRGQFTSQLRRKWGIEKSRETYHHHAVDALIIAASSQLRLWKKHSNPLIAYKEGQFVDSETGEIVSLSDEEYKELVFKAPYDHFVDTLRSKKFEDSILFSYQVDSKYNRKISDATIYATRKAKLDKEKKEYTYTLGKIKDIYALGTKTPSKTGFYKFLDLYKTDKSQFLMYQKDRKTWDEVIEKIIEQYRPFKEYDKNGKEVDFNPFEKYRIGNGPIRKYSKKGNGPEIKSLKYYDILLGKHKNITPDGSRNTVALLSLNPWRTDVYYNSETKKYEFLGLKYADLCFEEGGAYGISEVKYKKIREKEGIGKNSEFKFTLYKNDLILIKDTETNCQQFFRFWSRTGKDNPKSFEKHKIELKPYEKAKFEKGEELKVLGKVPPSSNQFQKNMQIENLSIYKVKTDILGNKHFIKKEGDEPKLKFKK

SEQ ID NO: 159 - protein, 1345 aa, Streptococcus mutans
MKKPYSIGLDIGTNSVGWAVVTDDYKVPAKKMKVLGNTDKSHIKKNLLGALLFDSGNTAEDRRLKRTARRRYTRRRNRILYLQEIFSEEMGKVDDSFFHRLDESFLTDDDKNFDSHPIFGNKAEEDAYHQKFPTIYHLRKHLADSTEKADLRLVYLALAHMIKFRGHFLIEGELNAENTDVQKLFADFVGVYDRTFDDSHLSEITVDASSILTEKISKSRRLEKLINNYPKEKKNTLFGNLIALSLGLQPNFKTNFKLSEDAKLQFSKDTYEEELEVLLAQIGDNYAELFLSAKKLYDSILLSGILTVTDVSTKAPLSASMIQRYNEHQMDLAQLKQFIRQKLSDKYNEVFSDVSKDGYAGYIDGKTNQEAFYKYLKGLLNKIEGSGYFLDKIEREDFLRKQRTFDNGSIPHQIHLQEMRAIIRRQAEFYPFLADNQDRIEKILTFRIPYYVGPLARGKSDFAWLSRKSADKITPWNFDEIVDKESSVEAFINRMTNYDLYLPNQKVLPKHSLLYEKFTVYNELTKVKYKTEQGKTAFFDANMKQEIFDGVFKVYRKVTKDKLMDFLEKEFDEFRIVDLTGLDKENKAFNASYGTYHDLRKILDKDFLDNSKNEKILEDIVLTLTLFEDREMIRKRLKNYSDLLTKEQLKKLERRHYTGWGRLSAELIHGIRNKESRKTILDYLIDDGNSNRNFMQLINDDALSFKEEIAKAQVIGETDNLNQVVSDIAGSPAIKKGILQSLKIVDELVKIMGHQPENIVVEMARENQFTNQGRRNSQQRLKGLTDSIKEFGSQILKEHPVENSQLQNDRLFLYYLQNGRDMYTGEELDIDYLSQYDIDHIIPQAFIKDNSIDNRVLTSSKENRGKSDDVPSKDVVRKMKSYWSKLLSAKLITQRKFDNLTKGERGGLTDDDKAGFIKRQLVETRQITKHVARILDERFNTETDENNKKIRQVKIVTLKSNLVSNFRKEFELYKVREINDYHHAHDAYLNAVIGKALLGVYPQLEPEFVYGDYPHFHGHKENKATAKKFFYSNIMNFFKKDDVRTDKNGEIIWKKDEYISNIKKVLSYPQVNIVKKVEEQTGGFSKESILPKGDSDKLIPRKTKKFYWDTKKYGGFDSPIVAYSILVIADIEKGKSKKLKTVKALVGVTIMEKMTFERDPVAFLERKGYRNVQEENIIKLPKYSLFKLENGRKRLLASARELQKGNEIVLPNHLGTLLYHAKNIHKVDEPKHLDYVDKHKDEFKELLDVVSNFSKKYTLAEGNLEKIKELYAQNNGEDLKELASSFINLLTFTAIGAPATFKFFDKNIDRKRYTSTTEILNATLIHQSITGLYETRIDLSKLGGD

SEQ ID NO: 160 - protein, 1127 aa, Streptococcus salivarius
MSDLVLGLDIGIGSVGVGILNKVTGEIIHKNSRIFPAAQAENNVERRINRQGRRLTRRKKHRRVRLNHLFEESGLITDFTNVSINLNPYQLRVKGLTDELSNEELFIALKNMVKHRGISYLDDASDDGNSSVGDYAQIVKENSKQLETKTPGQIQLERYQKYGQLRGDFTVEEDGKKHRLINVFPTSAYRAEALRILQTQQEFNPQITDEFINSYLQILTGKRKYYHGPGNEKSRTDYGRYTTKKDSEDEYITLDNIFGILIGKCTFYPEEYRAAKASYTAQEFNLLNDLNNLTVPTETKKLSEEQKNQIITNVKNEKAMGPAKLFKYIAKLLSCDVADIKGYRIDKSDKAEIHTFEAYRKMKTLATIDIEQMERENLDKLAYVLTLNTEKEGIQEALEHEFADGTFSQEQIDELVQFRKANSSIFGKGWHSFSVKLMMELIPELYATSEEQMTILTRLGKQKTTSSSNKTKYIDEKQLTEEIYNPVAAKSVRQAIKIVNAAIKEYGDFDNIVIEMARETNEDDEKKAIQKIQKANKDEKDAAMLKAANQYNGKAELPHSVFHGHKQLATKIRLWHQQGERCLYTGKTISIHDLINNSNQFEIDHILPLSITFDDSLANKVLVYATANQEKGQRTPYQALDSMDDAWSFRELKAFVRDSKALSNKKKEYLLTEEDISKFDVRKKFIERNLVDTRYASRVVLNALQEHFRVHKTDTKVSVVRGQFTSQLRRHWGIEKTRDTYHHHAVDALIIAASSQLNLWKKQKNTLVSYSEDQLLDIETGELISDDEYKESVFKAPYQHFVDTLKSKEFEDSILFSYQVDSKFNRKISDATIYATRQAKVGKDKKDETYVLGKIKDIYSQTGYDAFIKIYKKDKSKFLMYRHDPQTFEKVIEPILENYPNKELNEKGKEVPCNPFLKYKEDHGYIRKYSKKGNGPEIKSLKYYDSKLGNHIDITPKNSNNKVVLQSVSPWRADVYFNKTTGKYEILGLKYADLKFEKGTGTYKISEEKYNDIKIKEGVDSDSEFKFTLYKNDLLLIKDTETKEQQLFRFLSRTMPNVKHYVELKPYDKQKFDDNEELIKILGIVAKGGQCKKGVSKPNISIYKIRTDVLGNQHIIKNEGDKPKLDF

SEQ ID NO: 161 - protein, 1122 aa, Streptococcus suis
MSNGKILGLDIGIASVGVGVIDAQTGEIIHASSRIFPSANAANNAERRTFRGSRRLIRRKKHRIKRLDDLFNDFHINLDGEMSTDNPYVLRVKGLSQKLTVEELYISIKNIMKRRGISYLDDAESDNEAGRSDYAKAIERNRQLLTSKTPGEIQLERLEKYGQLRGNFTIIDEEGQSQQIINVFSTSDYVKEVEKILDCQKMYHKFISDEFCDKLIELLREKRKYYVGPGNEKSRTDYGIYRTDGTTLENLFGILIGKCTFYPDQYRSSRASYTAQEFNFLNDLNNLTVPTETKKLSQEQKEFLVNYAKETSVLGAGKILQQIAKLADCKVEDIRGYRLDNKDKPELHTFETYRAMKGLVPLVDIGVLSREQLDILADILTLNTDFEGIREALKKQLPNVFDEKQVKGLASFRKSKSQLFAKGWHNLSQKIMLEVIPELYATSDEQMTILTRLGKFEKSSVAEYPSSINVDEITDEIYNPVVAKSIRQTIKIINASIKKWDEFDQIVIEMPRDRNEDEEKKRIADGQKANAKEKADSILRAAELYCAGKVLPDYVYNGHNQLATKIRLWYQQGERCIYTGQPISIHDLIHNQNQYEIDHILPLSLTFDDSLSNKVLVLATANQEKAQRTPYNYLKSATSAWSYREFKDYVTKRKGIGKKKCEYLTFEEDINGFEVRSKFIQRNLVDTRYASKVILNALQDYFKISGIQTKVSVVRGQFTSQLRHKWGIEKTRETYHHHAVDALIIAASSQLRLWKKQESPLVVDYQEGRQVDLETGEILELTDEQYKELVYQPPYQGFVNTISSSAFDNEILFSYQVDSKVNRKISDATIYATRNAQLGKDKTEGIYVLGKIKDIYTQAGYEAFLKRYTKDKTSFLMYHKDLDTWEKVIEIILRDYREYDEKGKEIGNPFERYRRENGYVKKYSRKGNGTAIKSLKYYDNKLGNHIDITPENSRNAVVLQSLKPWRTDVYFNKETGKYEFLGIKYSDLSFEKGTGEYGISQEKYDSIKIAEGVAKKSIFKFTLYKQDLLFIKDIENNFGKLLRFTSKNDTSKHYVELKPYDKNKFGTEEPLLPVLGNVAKSGQCIKGLNKSNISIYKVRTDILGYRHFIKQEGEHPQLKFKK

SEQ ID NO: 162 - protein, 1122 aa, Streptococcus thermophilus
MSDLVLGLDIGIGSVGVGILNKVTGEIIHKNSRIFPAAQAENNLVRRTNRQGRRLTRRKKHRIVRLNRLFEESGLITDFTKISINLNPYQLRVKGLTDELSNEELFIALKNMVKHRGISYLDDASDDGNSSVGDYAQIVKENSKQLETKTPGQIQLERYQTYGQLRGDFTVEKDGKKHRLINVFPTSAYRSEALRILQTQQEFNSQITDEFINRYLEILTGKRKYYHGPGNEKSRTDYGRYRTNGETLDNIFGILIGKCTFYPDEFRAAKASYTAQEFNLLNDLNNLTVPTETKKLSKEQKNQIINYVKNEKVMGPAKLFKYIAKLLSCDVADIKGHRIDKSGKAEIHTFEAYRKMKTLETLDIEQMDRETLDKLAYVLTLNTEREGIQEALEHEFADGSFSQKQVDELVQFRKANSSIFGKGWHNFSVKLMMELIPELYETSEEQMTILTRLGKQKTTSSSNKTKYIDEKLLTEEIYNPVVAKSVRQAIKIVNAAIKEYGDFDNIVIEMARETNEDDEKKAIQKIQKANKDEKDAAMLKAANQYNGKAELPHSVFHGHKQLATKIRLWHQQGERCLYTGKTISIHDLINNPNQFEVDHILPLSITFDDSLANKVLVYATANQEKGQRTPYQALDSMDDAWSFRELKAFVRESKTLSNKKKEYLLTEEDISKFDVRKKFIERNLVDTRYASRVVLNALQEHFRAHKIDTKVSVVRGQFTSQLRRHWGIEKTRDTYHHHAVDALIIAASSQLNLWKKQKNTLVSYSEEQLLDIETGELISDDEYKESVFKAPYQHFVDTLKSKEFEDSILFSYQVDSKFNRKISDATIYATRQAKVGKDKKDETYVLGKIKDIYTQDGYDAFMKIYKKDKSKFLMYRHDPQTFEKVIEPILENYPNKEMNEKGKEVPCNPFLKYKEEHGYIRKYSKKGNGPEIKSLKYYDSKLLGNPIDITPENSKNKVVLQSLKPWRTDVYFNKNTGKYEILGLKYADLQFEKKTGTYKISQEKYNGIMKEEGVDSDSEFKFTLYKNDLLLVKDTETKEQQLFRFLSRTMPNVKYYVELKPYSKDKFEKNESLIEILGSADKSGRCIKGLGKSNISIYKVRTDVLGNQHIIKNEGDKPKLDF

SEQ ID NO: 163 - protein, 1395 aa, Treponema denticola
MKKEIKDYFLGLDVGTGSVGWAVTDTDYKLLKANRKDLWGMRCFETAETAEVRRLHRGARRRIERRKKRIKLLQELFSQEIAKTDEGFFQRMKESPFYAEDKTILQENTLFNDKDFADKTYHKAYPTINHLIKAWIENKVKPDPRLLYLACHNIIKKRGHFLFEGDFDSENQFDTSIQALFEYLREDMEVDIDADSQKVKEILKDSSLKNSEKQSRLNKILGLKPSDKQKKAITNLISGNKINFADLYDNPDLKDAEKNSISFSKDDFDALSDDLASILGDSFELLLKAKAVYNCSVLSKVIGDEQYLSFAKVKIYEKHKTDLTKLKNVIKKHFPKDYKKVFGYNKNEKNNNNYSGYVGVCKTKSKKLIINNSVNQEDFYKFLKTILSAKSEIKEVNDILTEIETGTFLPKQISKSNAEIPYQLRKMELEKILSNAEKHFSFLKQKDEKGLSHSEKIIMLLTFKIPYYIGPINDNHKKFFPDRCWVVKKEKSPSGKTTPWNFFDHIDKEKTAEAFITSRTNFCTYLVGESVLPKSSLLYSEYTVLNEINNLQIIIDGKNICDIKLKQKIYEDLFKKYKKITQKQISTFIKHEGICNKTDEVIILGIDKECTSSLKSYIELKNIFGKQVDEISTKNMLEEIIRWATIYDEGEGKTILKTKIKAEYGKYCSDEQIKKILNLKFSGWGRLSRKFLETVTSEMPGFSEPVNIITAMRETQNNLMELLSSEFTFTENIKKINSGFEDAEKQFSYDGLVKPLFLSPSVKKMLWQTLKLVKEISHITQAPPKKIFIEMAKGAELEPARTKTRLKILQDLYNNCKNDADAFSSEIKDLSGKIENEDNLRLRSDKLYLYYTQLGKCMYCGKPIEIGHVFDTSNYDIDHIYPQSKIKDDSISNRVLVCSSCNKNKEDKYPLKSEIQSKQRGFWNFLQRNNFISLEKLNRLTRATPISDDETAKFIARQLVETRQATKVAAKVLEKMFPETKIVYSKAETVSMFRNKFDIVKCREINDFHHAHDAYLNIVVGNVYNTKFTNNPWNFIKEKRDNPKIADTYNYYKVFDYDVKRNNITAWEKGKTIITVKDMLKRNTPIYTRQAACKKGELFNQTIMKKGLGQHPLKKEGPFSNISKYGGYNKVSAAYYTLIEYEEKGNKIRSLETIPLYLVKDIQKDQDVLKSYLTDLLGKKEFKILVPKIKINSLLKINGFPCHITGKTNDSFLLRPAVQFCCSNNEVLYFKKIIRFSEIRSQREKIGKTISPYEDLSFRSYIKENLWKKTKNDEIGEKEFYDLLQKKNLEIYDMLLTKHKDTIYKKRPNSATIDILVKGKEKFKSLIIENQFEVILEILKLFSATRNVSDLQHIGGSKYSGVAKIGNKISSLDNCILIYQSITGIFEKRIDLLKV

SEQ ID NO: 164 - protein, 1318 aa, Lactobacillus animalis
MGSNMLKKDYSIGLDIGTNSVGHAVVTDDYKVPTKKMKVFGDTSKKTIKKNMLGVLLFNEGQTAADTRLKRGTRRRYTRRKNRLRYLQEIFAPELAKVDPNFLYRLEESSLVAEDKKYDVYPIFGKREEELLYHDTYKTIYHLRSALANNDQPADLRLVYLALAHIIKYRGNFLLEGEIDLRTTDINKVFAEFSETLNENSDENLGKLDVADIFKNNTFSKTKKSEELLKLSGAKKNQLAHQLFKMMVGNMGSFKKVLGTDEEHKLSFGKDTYEDDLNDLLAEAGDQYLDIFVAAKKVYDAAILASILDVKDTQTKTVFSQAMIERYEEHQKDLIELKRVFKKYLPEKCHDFFSEPKISGYAGYIDGKVSEEDFYKYTKKTLKGIPETEEILQKIDANNYLRKQRTFDNGAIPHQVHLKELVAIVENQGKYYPFLRENKDKFEKILNFRIPYYVGPLARGNSKFAWLTRAGEGKITPYNFDEMIDKETSAEDFIKHMTINDLYLPTEPVLPKHSLLYERYTIFNELAGVRYVTENGEAKYFDAQTKRSIFELFKLDRKVSEKMVIKHLKVVMPAIRIQALKGLDNGKFNASYGTYKDLVDMGVAPELLNDEVNSEKWEDIIKTLTIFEGRKLIKRRLENYRDFLGEDILRKLSRKKYTGWGRLSAKLLDGIYDKKTHKTILDCLMTEDYSQNFMQLINDDNYSFKETIKNAQVIEKEETLAKTVQELPGSPAIKKGILQSLEIVDEIIKVMGYKPKSIVVEMARETQKTHGTRKREDRVQQIVENLKDANELPEKLPSNAELSDERKYLYCLQNGRDMYTGAPLDYDHLQFYDVDHIIPQSFLKDDSIENKVLTIKKENVRKTNGLPSEAVIQKMGSFWKKLLDAGAMTNKKYDNLRRNLHGGLNEKLKERFIERQLVETRQITKYVAQLLDQRLNYDGNGVELDEKIAIVTLKAQLASQFRSEFKLRKVRALNNLHHAHDAYLNAIVANLIMAKYPELEPEFVYGKYRKAKFKGLGKATAKNTLYANVLYFLKENEVYPFWDKARDLPTIKRYLYRAQVNKVRKAERQIGGFSDEMLVPKSDSGKLLPRKEGLDPVKYGGYAKAVESYAVLITADEVKKGKTKKVKTLVNIPIIDSKKYEADPTAYLASRGYTNVTNSFILPKYSLLEDPEGRRRYLASFKEFQKANELILPQHLVELLYWVNAKDGEQKLEDHKAEFKELFDKIMEFADKYVVAPKNSEKIRRLYEENQDATPMELGKNFVELLRYTADGAASDFKFFGENIPRKRYNSAGSLLNGTLIYQSKTGLYETRIDLGKL

SEQ ID NO: 165 - protein, 1395 aa, Lactobacillus ceti
MSKKYQNTKYYVGLDIGTSSVGWAVTDANYELLKVNGHKTWGSRLFTEAETALERRTHRATRRRLQRRKQRLDLLDELFAEELAKVDPQFLLRLKESQYHMEDKSTDDKYVLFNDQNRTDGEFFTEYPTIYHLRSELMQGKKEDIRAVYLALHHIVKYRGHFLLPGDNYDMQGNLSELIKRLFKFIEETLFIEDLGLTDEIQSKIEEILLTKTKTRLDRQKEIVKLFNTKHQKLDDKQKKLLEAIFKLCLGLKGNMVNIFGDKGEYGIDFTDVEDKKKKVEFSADYDNNINDYVDFFGEYFELLEITKKINDTVIFSEILVDGKGFSESKVISYEKHQQDLRKLKTLLKSLDKTLGYKYGEGLYQKILLDDVKSNYVNYSGNSQKLKKCTKDEFYGFIKSKLNSVTKKEKVSEAQQKEIAQILADMEFGDYLPLQRTTDNGVIPNQLHKKELIEIIEQQTKYHDFFNDVDENGLTIKDKIISLMTFRIPYYVGPLNDYHKVADGTGHAWIEKKKDGKIYPWNFDEMVDTEATAEKFIKNLTNKCTYLKGEDVLPKESKLYSEFMLLNELNNIKIDNQKLDPKLKMKMVSELFMKKNEKITKKKIVDYLRSIGQANGNEMVSGIDREIKSDLKTIHKIQHYYQDASLEMAENIIRWNTIFNDSTSDILKDKITKAYGDVLTPGQIKGLSNLACKDWGKLSEKFLTGIRCDVGEFKNISIIQAMRDTNNNLMELLSNKYEFMDKIQEYNKEYYGDFTFKAEPSIMDDLYVGPGPKRAIWQAVRIVEEIKRIMGHDPEKIFLETTRTNRAPKVKNTKRYDALEKKYESVKEHEYAEVKKEFEIEKNDSLNIKKLFLYFTQLGHCMYSDEKIPYNELFTNRYDIDHIYPRSKTRDNSMDNLVLVKAECNRDKKDNYPIKLKTNIQQKCQVRWAYLRDKKLITEEKYNRLVRKTPLTEDELSQFIARQLVFTSQSVKATAEVFKRLYEDSKICYVKAENVSDFRYGSTRKMSKDDQPQPFIKNRDVNDFHHAKDAYLNIVVGNVYDVKFTQNPTRFIKANKDYSLNYIFRYPVNKKGENVWDPEQSMKIVEKTLKSNDVRVTKLVKPITSPISNETLHKALKCKPGSYLPRKSSKGTPLADVTKYGGYEKIKNAYYSIYKYTYMKKKECMEEFLLVPIPIHLVNNDEELPKYINDKIAERAKKKKLETVECIVKELYQGTLVRINGYDYRIAGSSGKQFELHNGINLIVEPWVEKVLKETDKFVRKSNSKLDKKQQKENTTETLIEKQLNDVFEYLCRKLNQGIFKNNKHTLPAKLLGDSIQKRFEDASIEDEFEVIKELISAIAKNPQNFKTIQKVLDISGSSIPRFNLKLTKNNVDEFIIKNESVTGLFTHEKVIFRK

SEQ ID NO: 166 - protein, 1400 aa, Tissierellia bacterium
MGKQKFNDYYLGFDIGTNSAGWAVTDLQYKLLRFNKKDMWGSRLFDEAQTSKERRVYRNSRRRLDRRKKRLKLLEELFLDEISKIDNTFFKRLKESNLYNEDKSIKFNYPLFNDKDYTDIDFYNEYKTIYHLRKDLIFEDKKFDIRLVFIALHHILKYRGHFIFEGQSFEEIKSFDSIFTQLSSYFLENFDFNIDVSIKEKLEEIILSDNTKSIKKTEFKKIFSDNKVLSVLNMAIGSKVSLKDVFNNEELKEQKISFSEIDYENEKRDEFYQLLGEDIFLIDLAKKIYDFMVLKKILKNTDSFSASKVALYCEHKKDLDDLKYIFKKYLTKEDYFKFFRSNVEKINYPSYIGLNKIKSKKIIKENKCSISDINKELKNKYLKDIKLEAKDKELFNRIFNKLDEFKFLEKLKSSENSTVPYQVHEIELKKILDNQRKYYPFLNEKIDGKSVYEKIIQLFEFKIPYYIGPLNTDPNVKGKNTWVVRKDENNKTPITPWNFEQKVDMQKSAEEFIKRMTNRCTYLKAEDVIAKNSLLYEEFILLNELNKVTVDNEILHPTLKTEIINELFKTTVKVTKKKFIEFLKKKQAVNDVESITGIGVEFNCKLQGYNTFRKILGKKIENVNVKNFVEKCIELKCLYGSDKKLFENAIGKIYREYNITDEEFNKINRLNFNKWARLSKKFLTEISFEKTDGTKRFESVIEALRSTNYNLMELLSDKFNLQSKIDEINGEDDFSNIDIKEYVDKLYVSPSVKRSIIQTYKIAMEIKKITKKDPKKIFIEMAKDKGEKGKTTEKRKDKIKKLYKNIKDTLSDYCNNLQDLTLQVEKYDDNRLRQKKLFLYFMQMGKSMYTGRCIDLEDLFNNNVYDIDHIYPQSKVKDDSFDNIVLVEKEENHRKSNELLKEEIQSRMNNYWIFLRENKFISKEKYNRLTRKKDFTDEELGDFVARQLVTTRQSTKEIAKFFEKIFEKTTVVYSKASLVSEFREKYDIIKVREVNDAHHAQDAYLNIVVGNVFNTKFTKNYWKFTKDIKRQNEENPNEKKGYNLRKIYESDVFCNDSVAWVYSKENPKYNTINTVKDMVYRKTANITRMLVEGKGQLFNLTIKDKTQLKKNVGNIVANTPISLKNRKLHLNSVEIAKKYGYFDSLNNAYFVLFKYEEKGKEKIGFDSITIAYKERLKKNLDIEKFLENKGYKNSKLIRKIFKNQKVLINGYPYLLKSFNKQSQIKFNNFKILYLNENNLKFAKDAIKFEKNNANVDLKKQKYIVSFLKKKKQNEINETYEECIDRLNDEFDTLFLKLCDIQKSSIYTNYKLQDFSSNKKSIEIKDKFDIFKSLDLYKKSKLIKEFLNYYKYEKNDLDFSLIDIDKKANCIQKHFTEDLVKDFVIVDESVTGLFVKKERLK

SEQ ID NO: 167 - protein, 1398 aa, Veillonella parvula
METQASNQLISSHLKGYPIKDYFVGLDIGTSSVGWAVTNKAYELLKFRSHKMWGSRLFDEGESAVARRGFRSMRRRLERRKLRLKLLEELFADAMAQVDPTFFMRLRESKYHYEDKTTGHSSKHILFIDKNYNDQDYFKEYPTVYHLRSELMKSGTDDIRKLFLAVHHILKYRGNFLYEGATFDSNASTLDDVIKQALENITFNCFDCNSAISSIGQILMEAGKTKSDKAKAIEHLVDTYIATDTVDTSSKTQKDQVKEDKKRLKAFANLVLGLNASLIDLFGSVEELEEDLKKLQITGDTYDDKRDELAKAWSDEIYIIDDCKSVYDAIILLSIKEPGLTISESKVKAFNKHKDDLAILKSLLKSDRSIYNTMFKVDEKGLHNYVHYIKQGRTEETSCNREDFYKYTKKIVEGLSDSKDKEYILSQIELQILLPLQRIKDNGVIPYQLHLEELKAILAKCGPKFPFLNEVADGFSVAEKLIKMLEFRIPYYVGPLNTHHNVDNGGFAWAVRKASGRVTPWNFDDKIDREKSAAAFIKNLTNKCTYLLGEDVLPKSSLLYSEFMLLNELNNVRIDGKPLEKVVKEHLIEAVFKQDHKKMTKNRIEQFLKDNGYISETHKHEITGLDGEIKNDLASYRDMVRILGDGFDRSMAEEIITDITIFGESKKMLRETLRKKFASCLDDEAIKKLTKLRYRDWGRLSQKLLNGIEGCDKAGDGTPETIIILMRNFSYNLMELLGDKFSFMERIQEINAKLTEGQIVNPHDIIDDLALSPAVKRAVWQALRIVDEVAHIKKALPARIFVEVTRSNKNEKKKKDSRQKRLSDLYAAIKKDDVLLNGLNNEIFGELKSSLAKYDDAALRSKKLYLYYTQMGRCAYTGEIIELSLLNTDNYDIDHIYPRSLTKDDSFDNLVLCKRTANAQKSDAYPISEEIQKTQKPFWTFLKQQGLISERKYERLTRITPLTADDLSGFIARQLVETNQSVKAATTLLRRLYPGVDVVFVKAENVTDFRHDNNFIKVRSLNHHHHAKDAYLNIVVGNVYHERFTRNFRAFFKKNGANRTYNLAKMFNYDVNCTNAKDGKAWDVKTSMDTVKKMMDSNDVRVTKRLLEQTGALADATIYKATVAGKAKDGAYIGMKTKSSVFADVSKYGGMTKIKNAYSIIVQYTGKKGEVIKEIVPLPIYLTNRNTTDQDLINYVASIIPQAKDISIIYGKLCINQLVKVNGFYYYLGGKTNSKFCIDNAIQVIVSNEWIPYLKVLEKFNNMRKDNKDLKANVVSTRALDNKHTIEVRIVEEKNIEFFDYLVSKLKMPIYQKMKGNKAAELSEKGYGLFKKMSLEEQSIHLIELLNLLTNQKTTFEVKPLGITASRSTVGSKISNQDEFKVINESITGLYSNEVTIV

SEQ ID NO: 168 - protein, 1130 aa, Streptococcus gallolyticus
MTNGKILGLDIGIASVGVGIIEAKTGKVVHANSRLFSAANAENNAERRGFRGSRRLNRRKKHRVKRVRDLFEKYEIVTDFRNLNLNPYELRVKGLTEQLTNEELFAALRTISKRRGISYLDDAEDDSTGSTDYAKSIDENRRLLKTKTPGQIQLERLEKYGQLRGNFTVYDENGEAHRLINVFSTSDYEKEARKILETQADYNKKITAEFIDDYVEILTQKRKYYHGPGNEKSRTDYGRFRTDGTTLENIFGILIGKCSFYPDEYRASKASYTAQEYNFLNDLNNLKVPTETGKLSTEQKEALVEFAKSTATLGPAKLLKEIAKILDCKVDEIKGYREDDKGKPDLHTFEPYRKLKFNLDSVNIDDLSREVLDKLADILTLNTEREGIEDAIRHNLPNQFTEGQISEIIKVRKSQSTAFNKGWHSFSAKLMNELIPELYATSDEQMTILTRLEKFKVNKKSSKNTKTIDEKEVTDEIYNPVVAKSVRQTIKIINAAVKKYGDFDKIVIEMPRDKNADDEKKFIDKRNKENKKEKDDALKRAAYLYNGTDKLPDEVFHGNKQLETKIRLWYQQGERCLYSGKPIPIQELVHNSNNFEIDHILPLSLSFDDSLANKVLVYAWTNQEKGQKTPYQVIDSMDAAWSFREMKDYVLKQKGLGKKKRDYLLTTENIDKIEVKKKFIERNLVDTRYASRVVLNSLQSALRELGKDTKISVIRGQFTSQLRRKWKIDKSRETYHHHAVDALIIAASSQLKLWEKQDNPMFVDYGNNQVVDKQTGEILSVSDDEYKELVFQPPYQGFVNMISSKGFEDEILFSYQVDSKYNRKVSDATIYSTRKAKIGKDKKEETYVLGKIKDIYSQNGFDTFIKKYNKDKTQFLMYQKDPLTWENVIEVILRDYPTTKKSEDGKNDVKCNPFEEYRRENGLVCKYSKKGKGTPIKSLKYYDKKLGNCIDITPEGSKNEVVLQSLNPWRADVYFNPETLKYELLGLKYSDLSFEKGTGKYHISQEKYDVIKEKEGIGKKSEFKFTLYRNDLILIKDTASGEQEIYRFLSRTMPNVKHYAELKPYDKEKFDNVQELVEALGEADKVGRCIKGLNKSNLSIYKVRTDVLGNKYFVKKEGDKPKLDFKNNKK

SEQ ID NO: 169 - protein, 1054 aa, Staphylococcus pasteuri
MKEKYILGLDLGITSVGYGIINFETKKIIDAGVRLFPEANVDNNEGRRSKRGSRRLKRRRIHRLERVKLLLTEYDLINKEQIPTSNNPYQIRVKGLSEILSKDELAIALLHLAKRRGIHNINVSSEDEDASNELSTKEQINRNNKLLKDKYVCEVQLQRLKEGQIRGEKNRFKTTDILKEIDQLLKVQKDYHNLDIDFINQYKEIVETRREYFEGPGQGSPFGWNGDLKKWYEMLMGHCTYFPQELRSVKYAYSADLFNALNDLNNLIIQRDNSEKLEYHEKYHIIENVFKQKKKPTLKQIAKEIGVNPEDIKGYRITKSGTPQFTEFKLYHDLKSIVFDKSILENEAILDQIAEILTIYQDEQSIKEELNKLPEILNEQDKAEIAKLIGYNGTHRLSLKCIHLINEELWQTSRNQMEIFNYLNIKPNKVDLSEQNKIPKDMVNDFILSPVVKRTFIQSINVINKVIEKYGIPEDIIIELARENNSDDRKKFINNLQKKNEATRKRINEIIGQTGNQNAKRIVEKIRLHDQQEGKCLYSLESIALMDLLNNPQNYEVDHIIPRSVAFDNSIHNKVLVKQIENSKKGNRTPYQYLNSSDAKLSYNQFKQHILNLSKSKDRISKKKKDYLLEERDINKFEVQKEFINRNLVDTRYATRELTSYLKAYFSANNMDVKVKTINGSFTNHLRKVWRFDKYRNHGYKHHAEDALIIANADFLFKENKKLQNTNKILEKPTIENNTKKVTVEKEEDYNNVFETPKLVEDIKQYRDYKFSHRVDKKPNRQLINDTLYSTRMKDEHDYIVQTITDIYGKDNTNLKKQFNKNPEKFLMYQNDPKTFEKLSIIMKQYSDEKNPLAKYYEETGEYLTKYSKKNNGPIVKKIKLLGNKVGNHLDVTNKYENSTKKLVKLSIKNYRFDVYLTEKGYKFVTIAYLNVFKKDNYYYIPKDKYQELKEKKKIKDTDQFIASFYKNDLIKLNGDLYKIIGVNSDDRNIIELDYYDIKYKDYCEINNIKGEPRIKKTIGKKTESIEKFTTDVLGNLYLHSTEKAPQLIFKRGL

SEQ ID NO: 170 - protein, 1337 aa, Enterococcus faecalis
MKKDYVIGLDIGTNSVGWAVMTEDYQLVKKKMPIYGNTEKKKIKKNFWGVRLFEEGHTAEDRRLKRTARRRISRRRNRLRYLQAFFEEAMTDLDENFFARLQESFLVPEDKKWHRHPIFAKLEDEVAYHETYPTIYHLRKKLADSSEQADLRLIYLALAHIVKYRGHFLIEGKLSTENISVKEQFQQFMIIYNQTFVNGESRLVSAPLPESVLIEEELTEKASRTKKSEKVLQQFPQEKANGLFGQFLKLMVGNKADFKKVFGLEEEAKITYASESYEEDLEGILAKVGDEYSDVFLAAKNVYDAVELSTILADSDKKSHAKLSSSMIVRFTEHQEDLKKFKRFIRENCPDEYDNLFKNEQKDGYAGYIAHAGKVSQLKFYQYVKKIIQDIAGAEYFLEKIAQENFLRKQRTFDNGVIPHQIHLAELQAIIHRQAAYYPFLKENQEKIEQLVTFRIPYYVGPLSKGDASTFAWLKRQSEEPIRPWNLQETVDLDQSATAFIERMTNFDTYLPSEKVLPKHSLLYEKFMVFNELTKISYTDDRGIKANFSGKEKEKIFDYLFKTRRKVKKKDIIQFYRNEYNTEIVTLSGLEEDQFNASFSTYQDLLKCGLTRAELDHPDNAEKLEDIIKILTIFEDRQRIRTQLSTFKGQFSAEVLKKLERKHYTGWGRLSKKLINGIYDKESGKTILDYLVKDDGVSKHYNRNFMQLINDSQLSFKNAIQKAQSSEHEETLSETVNELAGSPAIKKGIYQSLKIVDELVAIMGYAPKRIVVEMARENQTTSTGKRRSIQRLKIVEKAMAEIGSNLLKEQPTTNEQLRDTRLFLYYMQNGKDMYTGDELSLHRLSHYDIDHIIPQSFMKDDSLDNLVLVGSTENRGKSDDVPSKEVVKDMKAYWEKLYAAGLISQRKFQRLTKGEQGGLTLEDKAHFIQRQLVETRQITKNVAGILNQRYNANSKEKKVQIITLKASLTSQFRSIFGLYKVREVNDYHHGQDAYLNCVVATTLLKVYPNLAPEFVYGEYPKFQTFKENKATAKAIIYTNLLRFFTEDEPRFTKDGEILWSNSYLKTIKKELNYHQMNIVKKVEVQKGGFSKESIKPKGPSNKLIPVKNGLDPQKYGGFDSPVVAYTVLFTHEKGKKPLIKQEILGITIMEKTRFEQNPILFLEEKGFLRPRVLMKLPKYTLYEFPEGRRRLLASAKEAQKGNQMVLPEHLLTLLYHAKQCLLPNQSESLAYVEQHQPEFQEILERVVDFAEVHTLAKSKVQQIVKLFEANQTADVKEIAASFIQLMQFNAMGAPSTFKFFQKDIERARYTSIKEIFDATIIYQSTTGLYETRRKVVD

SEQ ID NO: 171 - RNA, 17 nt, Prevotella histicola
  source 1..17: mol_type = unassigned RNA
gttgtgatttgctttaa

SEQ ID NO: 172 - RNA, 20 nt, Chryseobacterium gallinarum
  source 1..20: mol_type = unassigned RNA
gttgtgaagtgctttcaaaa

SEQ ID NO: 173 - RNA, 21 nt, Parabacteroides sp.
  source 1..21: mol_type = unassigned RNA
gttgtgatttgctttcatttt

SEQ ID NO: 174 - RNA, 16 nt, Capnocytophaga canis
  source 1..16: mol_type = unassigned RNA
gttgtaaattgctttc

SEQ ID NO: 175 - RNA, 22 nt, Ornithobacterium rhinotracheale
  source 1..22: mol_type = unassigned RNA
gttgtgatttgctttcaagttc

SEQ ID NO: 176 - RNA, 16 nt, Weeksella virosa
  source 1..16: mol_type = unassigned RNA
gttgtgaattcctttc

SEQ ID NO: 177 - RNA, 23 nt, Flavobacterium frigidarium
  source 1..23: mol_type = unassigned RNA
gttgtgaattgctttcaaaattg

SEQ ID NO: 178 - RNA, 19 nt, Rikenellaceae sp.
  source 1..19: mol_type = unassigned RNA
gttgtggtttgatgtagaa

SEQ ID NO: 179 - RNA, 16 nt, Jejuia pallidilutea
  source 1..16: mol_type = unassigned RNA
gttgtgaattgctttc

SEQ ID NO: 180 - RNA, 17 nt, Caenispirillum salinarum
  source 1..17: mol_type = unassigned RNA
gtcctgtagcccggtcc

SEQ ID NO: 181 - RNA, 19 nt, Salinispora pacifica
  source 1..19: mol_type = unassigned RNA
gttgtggcttgaatcagat

SEQ ID NO: 182 - RNA, 18 nt, Sulfitobacter donghicola
  source 1..18: mol_type = unassigned RNA
gttgcggctggacctcgg

SEQ ID NO: 183 - RNA, 17 nt, Mucispirillum schaedleri
  source 1..17: mol_type = unassigned RNA
gttctgtattgaccaca

SEQ ID NO: 184 - RNA, 19 nt, Mesorhizobium sp.
  source 1..19: mol_type = unassigned RNA
gttgcgattgggccgcgcc

SEQ ID NO: 185 - RNA, 23 nt, Neisseria meningitidis
  source 1..23: mol_type = unassigned RNA
gttgtagctcccattctcatttc

SEQ ID NO: 186 - RNA, 18 nt, Geobacillus sp.
  source 1..18: mol_type = unassigned RNA
gtcatagttcccctgaga

SEQ ID NO: 187 - RNA, 21 nt, Bacillus okhensis
  source 1..21: mol_type = unassigned RNA
gtcatatctccatctaatccg

SEQ ID NO: 188 - RNA, 16 nt, Tistrella mobilis
  source 1..16: mol_type = unassigned RNA
gccgtggtttccctac

SEQ ID NO: 189 - RNA, 20 nt, Kingella kingae
  source 1..20: mol_type = unassigned RNA
gttgtagttccctttctcat

SEQ ID NO: 190 - RNA, 15 nt, Clostridium perfringens
  source 1..15: mol_type = unassigned RNA
gttatagttcctagt

SEQ ID NO: 191 - RNA, 21 nt, Neisseria sp.
  source 1..21: mol_type = unassigned RNA
gttgtagcttcctctctcatc

SEQ ID NO: 192 - RNA, 16 nt, Campylobacter coli
  source 1..16: mol_type = unassigned RNA
gttttagtctcttttt

SEQ ID NO: 193 - RNA, 19 nt, Sulfurospirillum sp.
  source 1..19: mol_type = unassigned RNA
gttatagccccccatctca

SEQ ID NO: 194 - RNA, 16 nt, Dechloromonas denitrificans
  source 1..16: mol_type = unassigned RNA
gttgtagctccctctc

SEQ ID NO: 195 - RNA, 16 nt, Nitratifractor salsuginis
  source 1..16: mol_type = unassigned RNA
gttttaagacccctca

SEQ ID NO: 196 - RNA, 18 nt, Enterococcus cecorum
  source 1..18: mol_type = unassigned RNA
gtttttgtactcttaatg

SEQ ID NO: 197 - RNA, 16 nt, Facklamia hominis
  source 1..16: mol_type = unassigned RNA
gtttttgtactctcga

SEQ ID NO: 198 - RNA, 16 nt, Streptococcus sinensis
  source 1..16: mol_type = unassigned RNA
gtttttgtactctcaa

SEQ ID NO: 199 - RNA, 18 nt, unidentified
  source 1..18: mol_type = unassigned RNA; note = eubacterium dolichum
gttttgttaccatatgga

SEQ ID NO: 200 - RNA, 15 nt, Streptococcus macedonicus
  source 1..15: mol_type = unassigned RNA
gtttttgtactctca

SEQ ID NO: 201 - RNA, 17 nt, Turicibacter sp.
  source 1..17: mol_type = unassigned RNA
gttttagtacccttaag

SEQ ID NO: 202 - RNA, 16 nt, Bacillus niameyensis
  source 1..16: mol_type = unassigned RNA
gttttggcactctttc

SEQ ID NO: 203 - RNA, 17 nt, Massilibacterium senegalense
  source 1..17: mol_type = unassigned RNA
gttttagtactctgtta

SEQ ID NO: 204 - RNA, 16 nt, Kurthia huakuii
  source 1..16: mol_type = unassigned RNA
gttttagaccaatgta

SEQ ID NO: 205 - RNA, 17 nt, Streptococcus equinus
  source 1..17: mol_type = unassigned RNA
gttttagagctgtgttg

SEQ ID NO: 206 - RNA, 14 nt, Streptococcus equi
  source 1..14: mol_type = unassigned RNA
gttttagagttatg

SEQ ID NO: 207 - RNA, 18 nt, Enterococcus faecium
  source 1..18: mol_type = unassigned RNA
gttttagagctatgctga

SEQ ID NO: 208 - RNA, 17 nt, Enterococcus italicus
  source 1..17: mol_type = unassigned RNA
gttttagagctatgttg

SEQ ID NO: 209 - RNA, 17 nt, Streptococcus agalactiae
  source 1..17: mol_type = unassigned RNA
gttttagagctgtgctg

SEQ ID NO: 210 - RNA, 17 nt, Streptococcus ratti
  source 1..17: mol_type = unassigned RNA
gttttagagctgtgttg

SEQ ID NO: 211 - RNA, 14 nt, Listeria monocytogenes
  source 1..14: mol_type = unassigned RNA
gttttagagctatg

SEQ ID NO: 212 - RNA, 16 nt, Lactobacillus sp.
  source 1..16: mol_type = unassigned RNA
gtctcaggtagatgtc

SEQ ID NO: 213 - RNA, 16 nt, Pediococcus acidilactici
  source 1..16: mol_type = unassigned RNA
gtttcagaaggatgtt

SEQ ID NO: 214 - RNA, 15 nt, Acidaminococcus sp.
  source 1..15: mol_type = unassigned RNA
gtttgagagatatgt

SEQ ID NO: 215 - RNA, 16 nt, Lactobacillus sp.
  source 1..16: mol_type = unassigned RNA
gttttaggtggttgtt

SEQ ID NO: 216 - RNA, 17 nt, Treponema putidum
  source 1..17: mol_type = unassigned RNA
gtttgagagtagtgtaa

SEQ ID NO: 217 - RNA, 17 nt, Eubacterium sp.
  source 1..17: mol_type = unassigned RNA
gtttgagagtagtgtaa

SEQ ID NO: 218 - RNA, 14 nt, Bifidobacterium bombi
  source 1..14: mol_type = unassigned RNA
gtttcaaattcaat

SEQ ID NO: 219 - RNA, 16 nt, Corynebacterium camporealensis
  source 1..16: mol_type = unassigned RNA
gctggggttcagttcc

SEQ ID NO: 220 - RNA, 15 nt, Legionella pneumophila
  source 1..15: mol_type = unassigned RNA
gtttcagtggttgga

SEQ ID NO: 221 - RNA, 17 nt, unidentified
  source 1..17: mol_type = unassigned RNA
gctctggttggccggga

SEQ ID NO: 222 - RNA, 15 nt, unidentified
  source 1..15: mol_type = unassigned RNA
gttgtgatttgcttt

SEQ ID NO: 223 - RNA, 16 nt, unidentified
  source 1..16: mol_type = unassigned RNA
gttttcggcatctctc

SEQ ID NO: 224 - RNA, 16 nt, unidentified
  source 1..16: mol_type = unassigned RNA
gttatagtttccctca

SEQ ID NO: 225 - RNA, 17 nt, unidentified
  source 1..17: mol_type = unassigned RNA
gttgcggttggcccctg

SEQ ID NO: 226 - RNA, 19 nt, unidentified
  source 1..19: mol_type = unassigned RNA
gctgcggactgaggccgtt

SEQ ID NO: 227 - RNA, 17 nt, unidentified
  source 1..17: mol_type = unassigned RNA
gttgtggtttgatgtaa

SEQ ID NO: 228 - RNA, 17 nt, unidentified
  source 1..17: mol_type = unassigned RNA
gttatagccccctttct

SEQ ID NO: 229 - RNA, 19 nt, unidentified
  source 1..19: mol_type = unassigned RNA
gttccggtcagagcacaaa

SEQ ID NO: 230 - RNA, 18 nt, unidentified
  source 1..18: mol_type = unassigned RNA
gctgcggtttgcggccaa

SEQ ID NO: 231 - RNA, 18 nt, unidentified
  source 1..18: mol_type = unassigned RNA
gttgtggattccgggcag

SEQ ID NO: 232 - RNA, 16 nt, unidentified
  source 1..16: mol_type = unassigned RNA
gttgtgaattgctttc

SEQ ID NO: 233 - RNA, 18 nt, unidentified
  source 1..18: mol_type = unassigned RNA
gttgtggattgattagaa

SEQ ID NO: 234 - RNA, 17 nt, Acidaminococcus intestini
  source 1..17: mol_type = unassigned RNA
gtttgagagatatgtaa

SEQ ID NO: 235 - RNA, 18 nt, Coriobacterium glomerans
  source 1..18: mol_type = unassigned RNA
gttttggagcagtgtcgt

SEQ ID NO: 236 - RNA, 17 nt, Eggerthella sp.
  source 1..17: mol_type = unassigned RNA
gttttggagcagtggaa

SEQ ID NO: 237 - RNA, 18 nt, Finegoldia magna
  source 1..18: mol_type = unassigned RNA
gtttgagaatgatgtaat

SEQ ID NO: 238 - RNA, 16 nt, Lactobacillus rhamnosus
  source 1..16: mol_type = unassigned RNA
gtctcaggtagatgtc

SEQ ID NO: 239 - RNA, 18 nt, Mycoplasma gallisepticum
  source 1..18: mol_type = unassigned RNA
gttttagcactgtacaat

SEQ ID NO: 240 - RNA, 17 nt, Streptococcus agalactiae
  source 1..17: mol_type = unassigned RNA
gttttagagctgtgctg

SEQ ID NO: 241 - RNA, 17 nt, Streptococcus dysgalactiae
  source 1..17: mol_type = unassigned RNA
gttttagagctatgttg

SEQ ID NO: 242 - RNA, 18 nt, Streptococcus gallolyticus
  source 1..18: mol_type = unassigned RNA
gttttagagctgtgctgt

SEQ ID NO: 243 - RNA, 17 nt, Streptococcus gordonii
  source 1..17: mol_type = unassigned RNA
gtttttgtactctcaag

SEQ ID NO: 244 - RNA, 17 nt, Streptococcus mutans
  source 1..17: mol_type = unassigned RNA
gttttagagctgtgttg

SEQ ID NO: 245 - RNA, 16 nt, Streptococcus salivarius
  source 1..16: mol_type = unassigned RNA
gtttttgtactctcaa

SEQ ID NO: 246 - RNA, 18 nt, Streptococcus suis
  source 1..18: mol_type = unassigned RNA
gtttttgtactctcaaga

SEQ ID NO: 247 - RNA, 15 nt, Streptococcus thermophilus
  source 1..15: mol_type = unassigned RNA
gtttttgtactctca

SEQ ID NO: 248 - RNA, 17 nt, Treponema denticola
  source 1..17: mol_type = unassigned RNA
gtttgagagttgtgtaa

SEQ ID NO: 249 - RNA, 28 nt, Lactobacillus animalis
  source 1..28: mol_type = unassigned RNA
gttttagagctatgttgttttgtatgac

SEQ ID NO: 250 - RNA, 20 nt, Lactobacillus ceti
  source 1..20: mol_type = unassigned RNA
gtttgagaagtgtgttgttc

SEQ ID NO: 251 - RNA, 21 nt, Tissierellia bacterium
  source 1..21: mol_type = unassigned RNA
gtttgagagtaatgtaatcta

SEQ ID NO: 252 - RNA, 21 nt, Veillonella parvula
  source 1..21: mol_type = unassigned RNA
gtttgagagtagtgtaattct

SEQ ID NO: 253 - RNA, 12 nt, Streptococcus gallolyticus
  source 1..12: mol_type = unassigned RNA
gttttagagctg

SEQ ID NO: 254 - RNA, 12 nt, Staphylococcus pasteuri
  source 1..12: mol_type = unassigned RNA
gttttagtacac

SEQ ID NO: 255 - RNA, 12 nt, Enterococcus faecalis
  source 1..12: mol_type = unassigned RNA
gttttagagtca

SEQ ID NO: 256 - RNA, 17 nt, Prevotella histicola
  source 1..17: mol_type = unassigned RNA
ttaaagcaattcacaat

SEQ ID NO: 257 - RNA, 20 nt, Chryseobacterium gallinarum
  source 1..20: mol_type = unassigned RNA
ttttgaaagcacttcacaat

SEQ ID NO: 258 - RNA, 20 nt, Parabacteroides sp.
  source 1..20: mol_type = unassigned RNA
aaaatgaagcaaatcacaat

SEQ ID NO: 259 - RNA, 16 nt, Capnocytophaga canis
  source 1..16: mol_type = unassigned RNA
gaaagcaatttacaat

SEQ ID NO: 260 - RNA, 22 nt, Ornithobacterium rhinotracheale
  source 1..22: mol_type = unassigned RNA
gaacttaaaagcaaatcacaat

SEQ ID NO: 261 - RNA, 16 nt, Weeksella virosa
  source 1..16: mol_type = unassigned RNA
gaaaggaattcacaat

SEQ ID NO: 262 - RNA, 22 nt, Flavobacterium frigidarium
  source 1..22: mol_type = unassigned RNA
caattttgaagcaattcacaat

SEQ ID NO: 263 - RNA, 19 nt, Rikenellaceae sp.
  source 1..19: mol_type = unassigned RNA
ttctacatcttaccacaat

SEQ ID NO: 264 - RNA, 17 nt, Jejuia pallidilutea
  source 1..17: mol_type = unassigned RNA
gaaagacaattcacaac

SEQ ID NO: 265 - RNA, 19 nt, Caenispirillum salinarum
  source 1..19: mol_type = unassigned RNA
ggaccggcacctacaggac

SEQ ID NO: 266 - RNA, 19 nt, Salinispora pacifica
  source 1..19: mol_type = unassigned RNA
atctgattctttccacaat

SEQ ID NO: 267 - RNA, 19 nt, Sulfitobacter donghicola
  source 1..19: mol_type = unassigned RNA
ccgcggtcgagccgttaac

SEQ ID NO: 268 - RNA, 18 nt, Mucispirillum schaedleri
  source 1..18: mol_type = unassigned RNA
tgtggtgaatacagtaat

SEQ ID NO: 269 - RNA, 20 nt, Mesorhizobium sp.
  source 1..20: mol_type = unassigned RNA
ggcgtggcctctccgttaac

SEQ ID NO: 270 - RNA, 23 nt, Neisseria meningitidis
  source 1..23: mol_type = unassigned RNA
gaaatgagaaccgttgctacaat

SEQ ID NO: 271 - RNA, 18 nt, Geobacillus sp.
  source 1..18: mol_type = unassigned RNA
tctcagggttactatgat

SEQ ID NO: 272 - RNA, 21 nt, Bacillus okhensis
  source 1..21: mol_type = unassigned RNA
cggacatgatgttgatatgat

SEQ ID NO: 273 - RNA, 16 nt, Tistrella mobilis
  source 1..16: mol_type = unassigned RNA
gtagggaagccacggt

SEQ ID NO: 274 - RNA, 20 nt, Kingella kingae
  source 1..20: mol_type = unassigned RNA
atgagaaacgttgctacaat

SEQ ID NO: 275 - RNA, 15 nt, Clostridium perfringens
  source 1..15: mol_type = unassigned RNA
actagttactataac

SEQ ID NO: 276 - RNA, 21 nt, Neisseria sp.
  source 1..21: mol_type = unassigned RNA
gatgagagccgttgctacaat

SEQ ID NO: 277 - RNA, 16 nt, Campylobacter coli
  source 1..16: mol_type = unassigned RNA
aaaaagagactaaaat

SEQ ID NO: 278 - RNA, 20 nt, Sulfurospirillum sp.
  source 1..20: mol_type = unassigned RNA
tgagatctaagggctataat

SEQ ID NO: 279 - RNA, 18 nt, Dechloromonas denitrificans
  source 1..18: mol_type = unassigned RNA
gagagccgttgctacaat

SEQ ID NO: 280 - RNA, 16 nt, Nitratifractor salsuginis
  source 1..16: mol_type = unassigned RNA
tgaggggtcttaaaat

SEQ ID NO: 281 - RNA, 20 nt, Enterococcus cecorum
  source 1..20: mol_type = unassigned RNA
cattaagaatctacaaaaat

SEQ ID NO: 282 - RNA, 19 nt, Facklamia hominis
  source 1..19: mol_type = unassigned RNA
tctgagaatctacaaagat

SEQ ID NO: 283 - RNA, 19 nt, Streptococcus sinensis
  source 1..19: mol_type = unassigned RNA
ttgcagaagctacaaagat

SEQ ID NO: 284 - RNA, 20 nt, eubacterium dolichum
  source 1..20: mol_type = unassigned RNA
tttatatgatctaacaaaac

SEQ ID NO: 285 - RNA, 15 nt, Streptococcus macedonicus
  source 1..15: mol_type = unassigned RNA
tgagcctacaaagat

SEQ ID NO: 286 - RNA, 19 nt, Turicibacter sp.
  source 1..19: mol_type = unassigned RNA
cttaaggatctactaaaat

SEQ ID NO: 287 - RNA, 17 nt, Bacillus niameyensis
  source 1..17: mol_type = unassigned RNA
ggagaacctgtcaaaac

SEQ ID NO: 288 - RNA, 19 nt, Massilibacterium senegalense
  source 1..19: mol_type = unassigned RNA
taatagaatctactaaaat

SEQ ID NO: 289 - RNA, 19 nt, Kurthia huakuii
  source 1..19: mol_type = unassigned RNA
tacattggtaagttaaaat

SEQ ID NO: 290 - RNA, 19 nt, Streptococcus equinus
  source 1..19: mol_type = unassigned RNA
caacacagcgagttaaaat

SEQ ID NO: 291 - RNA, 17 nt, Streptococcus equi
  source 1..17: mol_type = unassigned RNA
catagcaaagttaaaat

SEQ ID NO: 292 - RNA, 20 nt, Enterococcus faecium
  source 1..20: mol_type = unassigned RNA
tcaatatagcaagttaaaat

SEQ ID NO: 293 - RNA, 19 nt, Enterococcus italicus
  source 1..19: mol_type = unassigned RNA
caacatagcaagttaaaat

SEQ ID NO: 294 - RNA, 19 nt, Streptococcus agalactiae
  source 1..19: mol_type = unassigned RNA
cagcacagcacgttaaaat

SEQ ID NO: 295 - RNA, 19 nt, Streptococcus ratti
  source 1..19: mol_type = unassigned RNA
caacacagcaagttaaaat

SEQ ID NO: 296 - RNA, 16 nt, Listeria monocytogenes
  source 1..16: mol_type = unassigned RNA
catagcaagttaaaat

SEQ ID NO: 297 - RNA, 19 nt, Lactobacillus sp.
  source 1..19: mol_type = unassigned RNA
gacatctacgagttgagat

SEQ ID NO: 298 - RNA, 18 nt, Pediococcus acidilactici
  source 1..18: mol_type = unassigned RNA
aacatcctgatttgaaat

SEQ ID NO: 299 - RNA, 15 nt, Acidaminococcus sp.
  source 1..15: mol_type = unassigned RNA
atatcgagttcaaat

SEQ ID NO: 300 - RNA, 19 nt, Lactobacillus sp.
  source 1..19: mol_type = unassigned RNA
aacaaccagattttaaaat

SEQ ID NO: 301 - RNA, 19 nt, Treponema putidum
  source 1..19: mol_type = unassigned RNA
ttacactacgagttcaaat

SEQ ID NO: 302 - RNA, 19 nt, Eubacterium sp.
  source 1..19: mol_type = unassigned RNA
ttacactacgagttcaaat

SEQ ID NO: 303 - RNA, 14 nt, Bifidobacterium bombi
  source 1..14: mol_type = unassigned RNA
attgaatttgaaat

SEQ ID NO: 304 - RNA, 16 nt, Corynebacterium camporealensis
  source 1..16: mol_type = unassigned RNA
ggaactgaacctcagt

SEQ ID NO: 305 - RNA, 16 nt, Legionella pneumophila
  source 1..16: mol_type = unassigned RNA
ttcgataccctgaaat

SEQ ID NO: 306 - RNA, 18 nt, unidentified
  source 1..18: mol_type = unassigned RNA
tccttgccgtatcagagc

SEQ ID NO: 307 - RNA, 15 nt, unidentified
  source 1..15: mol_type = unassigned RNA
gaagcaattcacaat

SEQ ID NO: 308 - RNA, 16 nt, unidentified
  source 1..16: mol_type = unassigned RNA
gagagatgtcgaaaat

SEQ ID NO: 309 - RNA, 16 nt, unidentified
  source 1..16: mol_type = unassigned RNA
tgaaggttactataat

SEQ ID NO: 310 - RNA, 18 nt, unidentified
  source 1..18: mol_type = unassigned RNA
caggggccacccgttaac

SEQ ID NO: 311 - RNA, 20 nt, unidentified
  source 1..20: mol_type = unassigned RNA
agcggcctctattcgcaagc

SEQ ID NO: 312 - RNA, 17 nt, unidentified
  source 1..17: mol_type = unassigned RNA
ttacatcttatcacaat

SEQ ID NO: 313 - RNA, 20 nt, unidentified
  source 1..20: mol_type = unassigned RNA
agaaacgaatgggctataat

SEQ ID NO: 314 - RNA, 20 nt, unidentified
  source 1..20: mol_type = unassigned RNA
tttgtgctttgaacgctaac

SEQ ID NO: 315 - RNA, 18 nt, unidentified
  source 1..18: mol_type = unassigned RNA
ttggctcgcttaccgcag

SEQ ID NO: 316 - RNA, 19 nt, unidentified
  source 1..19: mol_type = unassigned RNA
ctgccttggtttccataac

SEQ ID NO: 317 - RNA, 16 nt, unidentified
  source 1..16: mol_type = unassigned RNA
gaaagcaattcacaat

SEQ ID NO: 318 - RNA, 18 nt, unidentified
  source 1..18: mol_type = unassigned RNA
ttctaatctttccacaat

SEQ ID NO: 319 - RNA, 19 nt, Acidaminococcus intestini
  source 1..19: mol_type = unassigned RNA
ttacatatcgagttcaaat

SEQ ID NO: 320 - RNA, 20 nt, Coriobacterium glomerans
  source 1..20: mol_type = unassigned RNA
acagcactgcgagtcaaaat

SEQ ID NO: 321 - RNA, 19 nt, Eggerthella sp.
  source 1..19: mol_type = unassigned RNA
tttcactgcgagtcaaaat

SEQ ID NO: 322 - RNA, 20 nt, Finegoldia magna
  source 1..20: mol_type = unassigned RNA
attacatcatgagttcaaat

SEQ ID NO: 323 - RNA, 19 nt, Lactobacillus rhamnosus
  source 1..19: mol_type = unassigned RNA
gacatctacaagttgagat

SEQ ID NO: 324 - RNA, 19 nt, Mycoplasma gallisepticum
  source 1..19: mol_type = unassigned RNA
attattgtcgtgctaaaat

SEQ ID NO: 325 - RNA, 19 nt, Streptococcus agalactiae
  source 1..19: mol_type = unassigned RNA
cagcacagcacgttaaaat

SEQ ID NO: 326 - RNA, 19 nt, Streptococcus dysgalactiae
  source 1..19: mol_type = unassigned RNA
caacgtagcaagttaaaat

SEQ ID NO: 327 - RNA, 20 nt, Streptococcus gallolyticus
  source 1..20: mol_type = unassigned RNA
acaacacagcgagttaaaat

SEQ ID NO: 328 - RNA, 20 nt, Streptococcus gordonii
  source 1..20: mol_type = unassigned RNA
cttgcagaagctacaaagat

SEQ ID NO: 329 - RNA, 19 nt, Streptococcus mutans
  source 1..19: mol_type = unassigned RNA
caacacagcaagttaaaat

SEQ ID NO: 330 - RNA, 19 nt, Streptococcus salivarius
  source 1..19: mol_type = unassigned RNA
ttgcagaagctacaaagat

SEQ ID NO: 331 - RNA, 21 nt, Streptococcus suis
  source 1..21: mol_type = unassigned RNA
tcttgcagagcctacaaagat

SEQ ID NO: 332 - RNA, 18 nt, Streptococcus thermophilus
  source 1..18: mol_type = unassigned RNA
tgcagaagctacaaagat

SEQ ID NO: 333 - RNA, 33 nt, Treponema denticola
  source 1..33: mol_type = unassigned RNA
ttacacaacgagttcaaataagaattcatcaaa

SEQ ID NO: 334 - RNA, 21 nt, Lactobacillus animalis
  source 1..21: mol_type = unassigned RNA
gttatacaaaacaacattagc

SEQ ID NO: 335 - RNA, 23 nt, Lactobacillus ceti
  source 1..23: mol_type = unassigned RNA
gaacaacacacttaagttcaaat

SEQ ID NO: 336 - RNA, 23 nt, Tissierellia bacterium
  source 1..23: mol_type = unassigned RNA
tagattacattatgagttcaaat

SEQ ID NO: 337 - RNA, 23 nt, Veillonella parvula
  source 1..23: mol_type = unassigned RNA
agaattacattacgagttcaaat

SEQ ID NO: 338 - RNA, 14 nt, Streptococcus gallolyticus
  source 1..14: mol_type = unassigned RNA
cagcgagttaaaat

SEQ ID NO: 339 - RNA, 14 nt, Staphylococcus pasteuri
  source 1..14: mol_type = unassigned RNA
gaatctactgaaac

SEQ ID NO: 340 - RNA, 14 nt, Enterococcus faecalis
  source 1..14: mol_type = unassigned RNA
tagcaagttaaaat

SEQ ID NO: 341 - RNA, 60 nt, Prevotella histicola
  source 1..60: mol_type = unassigned RNA
aaggattattccgatgtgaaaacattaggttgcctcgtcctaccatacggggcttttttt

SEQ ID NO: 342 - RNA, 56 nt, Chryseobacterium gallinarum
  source 1..56: mol_type = unassigned RNA
aaggattattccgttgtgaaaacattcaaggcggggcaactcgcctttttcttttt

SEQ ID NO: 343 - RNA, 59 nt, Parabacteroides sp.
  source 1..59: mol_type = unassigned RNA
aaggattattccgttgtgaaaacattaggttccctcgcccttctgcgggggattttttt

SEQ ID NO: 344 - RNA, 56 nt, Capnocytophaga canis
  source 1..56: mol_type = unassigned RNA
aaggattattccgttgtgaaaacatctagtgcctcgcctatctgcggggctttttt

SEQ ID NO: 345 - RNA, 60 nt, Ornithobacterium rhinotracheale
  source 1..60: mol_type = unassigned RNA
aaggattattccgttgtgaaaacatttagtgcctcgactatcttcggggcaatttttttt

SEQ ID NO: 346 - RNA, 64 nt, Weeksella virosa
  source 1..64: mol_type = unassigned RNA
aaggattattccgttgtgaaaacatttgggttgcctcttgtccagaatcaggaggcattttttt

SEQ ID NO: 347 - RNA, 56 nt, Flavobacterium frigidarium
  source 1..56: mol_type = unassigned RNA
aaggattattccgttgtgaaaacattcaaagcggcctcacaagggtcgcttttttt

SEQ ID NO: 348 - RNA, 61 nt, Rikenellaceae sp.
  source 1..61: mol_type = unassigned RNA
aaggccatgggccgcaggttttaatacctatgtctccgcgtactccgtggagacttttttt

SEQ ID NO: 349 - RNA, 61 nt, Jejuia pallidilutea
  source 1..61: mol_type = unassigned RNA
aaggctataagccgtagagaaaattctagcccattgcttttgtaatgggcattttattttt

SEQ ID NO: 350 - RNA, 65 nt, Caenispirillum salinarum
  source 1..65: mol_type = unassigned RNA
aagtgatcatacacgtgacagccgcctcccccgccccagtggccaaggggaggcggcttttcttt

SEQ ID NO: 351 - RNA, 59 nt, Salinispora pacifica
  source 1..59: mol_type = unassigned RNA
aaggctatacgccgaagtgcggaaagcactattgccctgcctaggcagggcgttttttt

SEQ ID NO: 352 - RNA, 54 nt, Sulfitobacter donghicola
  source 1..54: mol_type = unassigned RNA
aagcattcgattgcaccacattaaaacgcgggccacggcccgcgttttcttttt

SEQ ID NO: 353 - RNA, 53 nt, Mucispirillum schaedleri
  source 1..53: mol_type = unassigned RNA
aagtgagtattcactcacaccaaatttagcctttctatatggaaggctttttt

SEQ ID NO: 354 - RNA, 46 nt, Mesorhizobium sp.
  source 1..46: mol_type = unassigned RNA
aaggcttcatgccaccagataaaggcgggctccggtccgccttttt

SEQ ID NO: 355 - RNA, 72 nt, Neisseria meningitidis
  source 1..72: mol_type = unassigned RNA
aaggccgtctgaaaagatgtgccgcaacgctctgccccttaaagcttctgctttaaggggcatcgtttattt

SEQ ID NO: 356 - RNA, 62 nt, Geobacillus sp.
  source 1..62: mol_type = unassigned RNA
aagggctttctgcctaaggcagactgacccgcggcgttggggatcgcctgtcgcccgctttt

SEQ ID NO: 357 - RNA, 130 nt, Bacillus okhensis
  source 1..130: mol_type = unassigned RNA
aagactgctttttaagcagttgtggcgttggggatcgcctgttcatctataaagatgaacttctccccactttatatattactatacacctcagttactacgaagatcgtacgtataactgaggtttttt

SEQ ID NO: 358 - RNA, 100 nt, Tistrella mobilis
  source 1..100: mol_type = unassigned RNA
aacagacttaccgtaaggtttctctgtgaaggatcatcccccattgggcaaccaatgggggaaattcctcatcaatacattgatgagatgctgaatcctt

SEQ ID NO: 359 - RNA, 96 nt, Kingella kingae
  source 1..96: mol_type = unassigned RNA
aagaagttctgaaaagaaattcgtaacgctctgcctcctaaaaatttcggtttttagcgggcatcgttttgtgatgaatagtgcaggctgcttttt

SEQ ID NO: 360 - RNA, 61 nt, Clostridium perfringens
  source 1..61: mol_type = unassigned RNA
aaggcattaagccgtaaagtatcccctatgttcatttgaacctaggggtatcttttcattt

SEQ ID NO: 361 - RNA, 93 nt, Neisseria sp.
  source 1..93: mol_type = unassigned RNA
aaggccgtctgaaaagacgtgccgcgacgtaaagattcagaaatgagttgagcccctgtttaagtccgcttaaacaggggcatcgtctttatt

SEQ ID NO: 362 - RNA, 83 nt, Campylobacter coli
  source 1..83: mol_type = unassigned RNA
aagtggttttcggttagccacgcagggttacaatccctttaaaaccgttaaaattcaaacaaactagcttgtctaattttatt

SEQ ID NO: 363 - RNA, 69 nt, Sulfurospirillum sp.
  source 1..69: mol_type = unassigned RNA
aagggtttctaagcttctcccgtgaagcgctactctacggagtatcttctaaaaagcttttcctttttt

SEQ ID NO: 364 - RNA, 100 nt, Dechloromonas denitrificans
  source 1..100: mol_type = unassigned RNA
aaggtgccccttcgggggcgaccgaatccggcccggcagggaaacctgccgggccttccttattccgacctcggtattcgtcactaatcacgcagttgca

SEQ ID NO: 365 - RNA, 94 nt, Nitratifractor salsuginis
  source 1..94: mol_type = unassigned RNA
caagaactgttacaacagttccattctagggcccatcttcggacgggcctcagcctctatttactacttctatttacagatcagaatttttctt

SEQ ID NO: 366 - RNA, 48 nt, Enterococcus cecorum
  source 1..48: mol_type = unassigned RNA
aagactttatgtcgagtttcccgtcatcattgtatggcgggttttttt

SEQ ID NO: 367 - RNA, 49 nt, Facklamia hominis
  source 1..49: mol_type = unassigned RNA
aaggctttatgccgaatttaccacctgacttttgatcaggtggtttttt

SEQ ID NO: 368 - RNA, 47 nt, Streptococcus sinensis
  source 1..47: mol_type = unassigned RNA
aaggcttcatgccgaaatcaacaccctgtctcttggcggggtgtttt

SEQ ID NO: 369 - RNA, 48 nt, eubacterium dolichum
  source 1..48: mol_type = unassigned RNA
aagggtttatcccggaatcaagttccaagtatatgcttggagcttttt

SEQ ID NO: 370 - RNA, 51 nt, Streptococcus macedonicus
  source 1..51: mol_type = unassigned RNA
aaggctttatgccgaattcaagcaccccatgttttgacatggggtgctttt

SEQ ID NO: 371 - RNA, 42 nt, Turicibacter sp.
  source 1..42: mol_type = unassigned RNA
aaggctttatgccgaaatcagcccctcactggggcttttttt

SEQ ID NO: 372 - RNA, 54 nt, Bacillus niameyensis
  source 1..54: mol_type = unassigned RNA
aagggtttatcccgaactcagaaccccattttactggggttcttttctttttct

SEQ ID NO: 373 - RNA, 59 nt, Massilibacterium senegalense
  source 1..59: mol_type = unassigned RNA
aaggccatagtgccgtatttgatctattaggatctgaccccgcatatgcggggtttttt

SEQ ID NO: 374 - RNA, 68 nt, Kurthia huakuii
  source 1..68: mol_type = unassigned RNA
aagcttaaagcgtaaaagttggtcatattagacctccaacctgtagactatatgtctacaggtttttt

SEQ ID NO: 375 - RNA, 56 nt, Streptococcus equinus
  source 1..56: mol_type = unassigned RNA
aaggctttgtccgtacacaacttgtaaaagtggcacccgattcgggtgcatttttt

SEQ ID NO: 376 - RNA, 54 nt, Streptococcus equi
  source 1..54: mol_type = unassigned RNA
aaggctttgtccgtaatcaacctgaaaaggggagcaccgaatcggtgctttttt

SEQ ID NO: 377 - RNA, 56 nt, Enterococcus faecium
  source 1..56: mol_type = unassigned RNA
aaggctttgtccgtcatcagcttttttaaagcagcgctgttctcggcgcttttttt

SEQ ID NO: 378 - RNA, 53 nt, Enterococcus italicus
  source 1..53: mol_type = unassigned RNA
aaggtttaaccgtaatcaactttttagtggcgctgtctcggcgctattttttt

SEQ ID NO: 379 - RNA, 67 nt, Streptococcus agalactiae
  source 1..67: mol_type = unassigned RNA
aaggcagtgatttttaatccagtccgtattcagcttgaaaaagtgagcaccgattcggtgctttttt

SEQ ID NO: 380 - RNA, 53 nt, Streptococcus ratti
  source 1..53: mol_type = unassigned RNA
aaggtttatccgtattcaacttgaaaaagtgcgcaccgattcggtgctttttt

SEQ ID NO: 381 - RNA, 68 nt, Listeria monocytogenes
  source 1..68: mol_type = unassigned RNA
aaggctttgtccgttatcaacttttaattaagtagcgctgtttcggcgctttttttgtgcactttttt

SEQ ID NO: 382 - RNA, 86 nt, Lactobacillus sp.
  source 1..86: mol_type = unassigned RNA
caaacaaagcttcggctgagtttcaatttctgagcccatgttgggccatacatatgccacccgagtgcaaatcgggtggttttttt

SEQ ID NO: 383 - RNA, 102 nt, Pediococcus acidilactici
  source 1..102: mol_type = unassigned RNA
caaacaatgcactttgtgcggagtttatccacttgtcccagctatctgggcaatacatagtgaaagaggaaccgacccttaatgggacggctcctctttttt

SEQ ID NO: 384 - RNA, 78 nt, Acidaminococcus sp.
  source 1..78: mol_type = unassigned RNA
aacgtttttacgaagtcgccggttcgtccggcagcacagtgtgtgctatgacctgcttaggcaggtcttttctttttt

SEQ ID NO: 385 - RNA, 80 nt, Lactobacillus sp.
  source 1..80: mol_type = unassigned RNA
caaacaatgtatcttttagatactaagtttcaatgcggtttattaccgtcctgcctcagctctatagcggaggttttttt

SEQ ID NO: 386 - RNA, 78 nt, Treponema putidum
  source 1..78: mol_type = unassigned RNA
aagaatttatcaaaatcgtccctttttgggactgctcattgtggagcatcaaggcttaacattgttaagccttttttt

SEQ ID NO: 387 - RNA, 79 nt, Eubacterium sp.
  source 1..79: mol_type = unassigned RNA
aaaaatttattctaaccgttgctttggcaacatcacagtgtgtgagttgagacctgcttttgcaggtctttttattttt

SEQ ID NO: 388 - RNA, 67 nt, Bifidobacterium bombi
  source 1..67: mol_type = unassigned RNA
aaggctgttccttcgttagttcagtcgattgctcctccggtattgcttttgcatgccggagtttttt

SEQ ID NO: 389 - RNA, 63 nt, Corynebacterium camporealensis
  source 1..63: mol_type = unassigned RNA
aatcaccggctcgtttccggtgaagaatgctccagtcggcgcccactgggcgtcgacttttct

SEQ ID NO: 390 - RNA, 100 nt, Legionella pneumophila
  source 1..100: mol_type = unassigned RNA
caacaaaattaaagattgaatcgtttttctatgctcgtcttaatagcgagcatataacgatttcaaaatctatcgttacagtgatttagaaactcacact

SEQ ID NO: 391 - RNA, 78 nt, unidentified
  source 1..78: mol_type = unassigned RNA
aaggttgcgtcctgccgcgaggtacctggaaacagtagcctctgaggacgccccctgttgggggcgtttttatttttt

SEQ ID NO: 392 - RNA, 62 nt, unidentified
  source 1..62: mol_type = unassigned RNA
aaggattattccgttgtgaataacattttaagcggcccccaaaaggggtcgtttcttttttt

SEQ ID NO: 393 - RNA, 51 nt, unidentified
  source 1..51: mol_type = unassigned RNA
aaaggtttggggctgaacctgcaaagcactatcctgaaaaggttatcttct

SEQ ID NO: 394 - RNA, 63 nt, unidentified
  source 1..63: mol_type = unassigned RNA
aaggctaacaaccgtaaggtatcccccgtcagtgcccgtcattgacgggggtatccttttttt

SEQ ID NO: 395 - RNA, 69 nt, unidentified
  source 1..69: mol_type = unassigned RNA
aagcaccttgagtgcaaaaaatttctcctctggagaagcgtggcgggctgcggcccgccatttgcgttt

SEQ ID NO: 396 - RNA, 84 nt, unidentified
  source 1..84: mol_type = unassigned RNA
aataggaccctttgtgtgggctcggcatcccaaggtcactgccggtattgttcgattcgaagccccgccacggcggggcttttt

SEQ ID NO: 397 - RNA, 60 nt, unidentified
  source 1..60: mol_type = unassigned RNA
aaggctatatgccgaaggatgtaaatcctatactcccgcttcggtgggagtttggttttt

SEQ ID NO: 398 - RNA, 69 nt, unidentified
  source 1..69: mol_type = unassigned RNA
aaacaggttatggttcctgtgcaaggctctgaacactgttcatccttaaaaaaaccaattttctttttt

SEQ ID NO: 399 - RNA, 47 nt, unidentified
  source 1..47: mol_type = unassigned RNA
aagcatcagatgcaccaaatgcggggccgctatatgcggcccctttt

SEQ ID NO: 400 - RNA, 100 nt, unidentified
  source 1..100: mol_type = unassigned RNA
gcaaagcttaagcgttccaagagcgagggctgggcgcccctccgacgcgatatacgcccaactttcaagcccttgccggttacgccggcaggggctttcc

SEQ ID NO: 401 - RNA, 80 nt, unidentified
  source 1..80: mol_type = unassigned RNA
aagaaggtgaaaccttcgcaggatatcccgaaagggtaaaccgcacgcctccagatcgacagatctgggggcgtattgtt

SEQ ID NO: 402 - RNA, 60 nt, unidentified
  source 1..60: mol_type = unassigned RNA
aaggattattccgttgtgaaaacatttagtcgcctcgtctatctacggggcatttttttt

SEQ ID NO: 403 - RNA, 57 nt, unidentified
  source 1..57: mol_type = unassigned RNA
aaggctataggccgtaggagatgatttcctttgcccttgcttcggtaggggcttttt

SEQ ID NO: 404 - RNA, 78 nt, Acidaminococcus intestini; identical to SEQ ID NO: 384
  source 1..78: mol_type = unassigned RNA

SEQ ID NO: 405 - RNA, 78 nt, Coriobacterium glomerans
  source 1..78: mol_type = unassigned RNA
acggctttgccaaacttgcctcccttcggaggcgtctcgtaggagacaatttgaagcccctttaggggcttcattttt

SEQ ID NO: 406 - RNA, 85 nt, Eggerthella sp.
  source 1..85: mol_type = unassigned RNA
acggcgcttgccaaaaatgcttcggcgccacgtaggtggcaatttcgactccaggcaaggaacccttctggggtttcttgttttt

SEQ ID NO: 407 - RNA, 70 nt, Finegoldia magna
  source 1..70: mol_type = unassigned RNA
aaaagtttactcaaatcgcccgaaagagcccacattggtggactaaacaaatcttcggatttgttttttt

SEQ ID NO: 408 - RNA, 86 nt, Lactobacillus rhamnosus
  source 1..86: mol_type = unassigned RNA
caaacaaagcttcggctgagtttcaatttctgagcccatgttgggccatacatatgccacccgagtgcaagtcgggtggctttttt

SEQ ID NO: 409 - RNA, 56 nt, Mycoplasma gallisepticum
  source 1..56: mol_type = unassigned RNA
aaggcgctgctaatgcagctgccgcatccgccagagcatttatgctctggcttttt

SEQ ID NO: 410 - RNA, 68 nt, Streptococcus agalactiae
  source 1..68: mol_type = unassigned RNA
aaggcagtgatttttaatccagtccgtattcagcttgaaaaagtgagcaccgattcggtgcttttttt

SEQ ID NO: 411 - RNA, 51 nt, Streptococcus dysgalactiae
  source 1..51: mol_type = unassigned RNA
aaggctagtccgttatcaacttgaaaaagtggcaccgagtcggtgcttttt

SEQ ID NO: 412 - RNA, 57 nt, Streptococcus gallolyticus
  source 1..57: mol_type = unassigned RNA
aaggctttgtccgtacacaacttgtaaaagtggcacccgattcgggtgcgttttttt

SEQ ID NO: 413 - RNA, 49 nt, Streptococcus gordonii
  source 1..49: mol_type = unassigned RNA
aaggcttcatgccgaattcaacaccctgtcatttatggcggggtgtttt

SEQ ID NO: 414 - RNA, 53 nt, Streptococcus mutans; identical to SEQ ID NO: 380
  source 1..53: mol_type = unassigned RNA

SEQ ID NO: 415 - RNA, 50 nt, Streptococcus salivarius
  source 1..50: mol_type = unassigned RNA
aaggcttcatgccgaaatcaacaccctgtcattttatggcagggtgtttt

SEQ ID NO: 416 - RNA, 48 nt, Streptococcus suis
  source 1..48: mol_type = unassigned RNA
aaggctttatgccgaaatcaagcaccccgtttcgtacggggtgctttt

SEQ ID NO: 417 - RNA, 50 nt, Streptococcus thermophilus; identical to SEQ ID NO: 415
  source 1..50: mol_type = unassigned RNA

SEQ ID NO: 418 - RNA, 64 nt, Treponema denticola
  source 1..64: mol_type = unassigned RNA
atcgtcccttttgggaccgctcattgtggagcatcaaggcttaacatggttaagcctttttttt

SEQ ID NO: 419 - RNA, 76 nt, Lactobacillus animalis
  source 1..76: mol_type = unassigned RNA
gaagttaaaataaggtttaatccgtaatcaacaagttttatcttgcgcgcgccgtttcggcgctttttttgttttt

SEQ ID NO: 420 - RNA, 77 nt, Lactobacillus ceti
  source 1..77: mol_type = unassigned RNA
aaaaatttattctattgaccagaaatggcagcccgctgtgggcattttaacttcatttttttaaatgaagttttttt

SEQ ID NO: 421 - RNA, 73 nt, Tissierellia bacterium
  source 1..73: mol_type = unassigned RNA
aaaaatttattcaaaccgccagtaatggctaacctaagttgtttaggcaaaactcactaaggtgagttttttt

SEQ ID NO: 422 - RNA, 75 nt, Veillonella parvula
  source 1..75: mol_type = unassigned RNA
acaaattaatttacaatgccttcgggctgcccgacgtagggcacctactctcaattcttcggaattgagtttttt

SEQ ID NO: 423 - RNA, 57 nt, Streptococcus gallolyticus; identical to SEQ ID NO: 412
  source 1..57: mol_type = unassigned RNA

SEQ ID NO: 424 - RNA, 49 nt, Staphylococcus pasteuri
  source 1..49: mol_type = unassigned RNA
aagactatatgtcgtgtttatcccactaatttattagtgggattttttt

SEQ ID NO: 425 - RNA, 52 nt, Enterococcus faecalis
  source 1..52: mol_type = unassigned RNA
aaggttttaaccgtaatcaactgtaaagtggcgctgtttcggcgcttttttt

SEQ ID NO: 426 - RNA, 98 nt, synthetic construct
  misc_feature 1..98: note = sgRNA solution for Cas9 from ID2 Clade 1
  source 1..98: mol_type = other RNA
gttgtgatttgctttaagaaattaaagcaattcacaataaggattattccgatgtgaaaacattaggttgcctcgtcctaccatacggggcttttttt

SEQ ID NO: 427 - RNA, 100 nt, synthetic construct
  misc_feature 1..100: note = sgRNA solution for Cas9 from ID3 Clade 1
  source 1..100: mol_type = other RNA
gttgtgaagtgctttcaaaagaaattttgaaagcacttcacaataaggattattccgttgtgaaaacattcaaggcggggcaactcgcctttttcttttt

SEQ ID NO: 428 - RNA, 104 nt, synthetic construct
  misc_feature 1..104: note = sgRNA solution for Cas9 from ID4 Clade 1
  source 1..104: mol_type = other RNA
gttgtgatttgctttcattttgaaaaaaatgaagcaaatcacaataaggattattccgttgtgaaaacattaggttccctcgcccttctgcgggggattttttt

SEQ ID NO: 429 - RNA, 92 nt, synthetic construct
  misc_feature 1..92: note = sgRNA solution for Cas9 from ID4 Clade 1
  source 1..92: mol_type = other RNA
gttgtaaattgctttcgaaagaaagcaatttacaataaggattattccgttgtgaaaacatctagtgcctcgcctatctgcggggctttttt

SEQ ID NO: 430 - RNA, 108 nt, synthetic construct
  misc_feature 1..108: note = sgRNA solution for Cas9 from ID6 Clade 1
  source 1..108: mol_type = other RNA
gttgtgatttgctttcaagttcgaaagaacttaaaagcaaatcacaataaggattattccgttgtgaaaacatttagtgcctcgactatcttcggggcaatttttttt

SEQ ID NO: 431 - RNA, 100 nt, synthetic construct
  misc_feature 1..100: note = sgRNA solution for Cas9 from ID8 Clade 1
  source 1..100: mol_type = other RNA
gttgtgaattcctttcgaaagaaaggaattcacaataaggattattccgttgtgaaaacatttgggttgcctcttgtccagaatcaggaggcattttttt

SEQ ID NO: 432 - RNA, 105 nt, synthetic construct
  misc_feature 1..105: note = sgRNA solution for Cas9 from ID9 Clade 1
  source 1..105: mol_type = other RNA
gttgtgaattgctttcaaaattggaaacaattttgaagcaattcacaataaggattattccgttgtgaaaacattcaaagcggcctcacaagggtcgcttttttt

SEQ ID NO: 433 - RNA, 103 nt, synthetic construct
  misc_feature 1..103: note = sgRNA solution for Cas9 from ID12 Clade 2
  source 1..103: mol_type = other RNA
gttgtggtttgatgtagaagaaattctacatcttaccacaataaggccatgggccgcaggttttaatacctatgtctccgcgtactccgtggagacttttttt

SEQ ID NO: 434 - RNA, 98 nt, synthetic construct
  misc_feature 1..98: note = sgRNA solution for Cas9 from ID13 Clade 2
  source 1..98: mol_type = other RNA
gttgtgaattgctttcgaaagaaagacaattcacaacaaggctataagccgtagagaaaattctagcccattgcttttgtaatgggcattttattttt

SEQ ID NO: 435 - RNA, 105 nt, synthetic construct
  misc_feature 1..105: note = sgRNA solution for Cas9 from ID16 Clade 3
  source 1..105: mol_type = other RNA
gtcctgtagcccggtccgaaaggaccggcacctacaggacaagtgatcatacacgtgacagccgcctcccccgccccagtggccaaggggaggcggcttttcttt

SEQ ID NO: 436 - RNA, 101 nt, synthetic construct
  misc_feature 1..101: note = sgRNA solution for Cas9 from ID17 Clade 3
  source 1..101: mol_type = other RNA
gttgtggcttgaatcagatgaaaatctgattctttccacaataaggctatacgccgaagtgcggaaagcactattgccctgcctaggcagggcgttttttt

SEQ ID NO: 437 - RNA, 95 nt, synthetic construct
  misc_feature 1..95: note = sgRNA solution for Cas9 from ID18 Clade 3
  source 1..95: mol_type = other RNA
gttgcggctggacctcgggaaaccgcggtcgagccgttaacaagcattcgattgcaccacattaaaacgcgggccacggcccgcgttttcttttt

SEQ ID NO: 438 - RNA, 92 nt, synthetic construct
  misc_feature 1..92: note = sgRNA solution for Cas9 from ID19 Clade 3
  source 1..92: mol_type = other RNA
gttctgtattgaccacagaaatgtggtgaatacagtaataagtgagtattcactcacaccaaatttagcctttctatatggaaggctttttt

SEQ ID NO: 439 - RNA, 89 nt, synthetic construct
  misc_feature 1..89: note = sgRNA solution for Cas9 from ID21 Clade 3
  source 1..89: mol_type = other RNA
gttgcgattgggccgcgccgaaaggcgtggcctctccgttaacaaggcttcatgccaccagataaaggcgggctccggtccgccttttt

SEQ ID NO: 440 - RNA, 122 nt, synthetic construct
  misc_feature 1..122: note = sgRNA solution for Cas9 from ID27 Clade 5
  source 1..122: mol_type = other RNA
gttgtagctcccattctcatttcgaaagaaatgagaaccgttgctacaataaggccgtctgaaaagatgtgccgcaacgctctgccccttaaagcttctgctttaaggggcatcgtttattt

SEQ ID NO: 441 - RNA, 102 nt, synthetic construct
  misc_feature 1..102: note = sgRNA solution for Cas9 from ID28 Clade 5
  source 1..102: mol_type = other RNA
gtcatagttcccctgagagaaatctcagggttactatgataagggctttctgcctaaggcagactgacccgcggcgttggggatcgcctgtcgcccgctttt

SEQ ID NO: 442 - RNA, 176 nt, synthetic construct
  misc_feature 1..176: note = sgRNA solution for Cas9 from ID29 Clade 5
  source 1..176: mol_type = other RNA
gtcatatctccatctaatccggaaacggacatgatgttgatatgataagactgctttttaagcagttgtggcgttggggatcgcctgttcatctataaagatgaacttctccccactttatatattactatacacctcagttactacgaagatcgtacgtataactgaggtttttt

SEQ ID NO: 443 - RNA, 136 nt, synthetic construct
  misc_feature 1..136: note = sgRNA solution for Cas9 from ID30 Clade 5
  source 1..136: mol_type = other RNA
gccgtggtttccctacgaaagtagggaagccacggtaacagacttaccgtaaggtttctctgtgaaggatcatcccccattgggcaaccaatgggggaaattcctcatcaatacattgatgagatgctgaatcctt

SEQ ID NO: 444 - RNA, 140 nt, synthetic construct
  misc_feature 1..140: note = sgRNA solution for Cas9 from ID32 Clade 5
  source 1..140: mol_type = other RNA
gttgtagttccctttctcatgaaaatgagaaacgttgctacaataagaagttctgaaaagaaattcgtaacgctctgcctcctaaaaatttcggtttttagcgggcatcgttttgtgatgaatagtgcaggctgcttttt

SEQ ID NO: 445 - RNA, 95 nt, synthetic construct
  misc_feature 1..95: note = sgRNA solution for Cas9 from ID33 Clade 5
  source 1..95: mol_type = other RNA
gttatagttcctagtgaaaactagttactataacaaggcattaagccgtaaagtatcccctatgttcatttgaacctaggggtatcttttcattt

SEQ ID NO: 446 - RNA, 139 nt, synthetic construct
  misc_feature 1..139: note = sgRNA solution for Cas9 from ID35 Clade 5
  source 1..139: mol_type = other RNA
gttgtagcttcctctctcatcgaaagatgagagccgttgctacaataaggccgtctgaaaagacgtgccgcgacgtaaagattcagaaatgagttgagcccctgtttaagtccgcttaaacaggggcatcgtctttatt

SEQ ID NO: 447 - RNA, 119 nt, synthetic construct
  misc_feature 1..119: note = sgRNA solution for Cas9 from ID41 Clade 5
  source 1..119: mol_type = other RNA
gttttagtctctttttgaaaaaaaagagactaaaataagtggttttcggttagccacgcagggttacaatccctttaaaaccgttaaaattcaaacaaactagcttgtctaattttatt

SEQ ID NO: 448 - RNA, 112 nt, synthetic construct
  misc_feature 1..112: note = sgRNA solution for Cas9 from ID43 Clade 5
  source 1..112: mol_type = other RNA
gttatagccccccatctcagaaatgagatctaagggctataataagggtttctaagcttctcccgtgaagcgctactctacggagtatcttctaaaaagcttttcctttttt

SEQ ID NO: 449 - RNA, 138 nt, synthetic construct
  misc_feature 1..138: note = sgRNA solution for Cas9 from ID44 Clade 5
  source 1..138: mol_type = other RNA
gttgtagctccctctcgaaagagagccgttgctacaataaggtgccccttcgggggcgaccgaatccggcccggcagggaaacctgccgggccttccttattccgacctcggtattcgtcactaatcacgcagttgca

SEQ ID NO: 450 - RNA, 130 nt, synthetic construct
  misc_feature 1..130: note = sgRNA solution for Cas9 from ID46 Clade 6
  source 1..130: mol_type = other RNA
gttttaagacccctcagaaatgaggggtcttaaaatcaagaactgttacaacagttccattctagggcccatcttcggacgggcctcagcctctatttactacttctatttacagatcagaatttttctt

SEQ ID NO: 451 - RNA, 90 nt, synthetic construct
  misc_feature 1..90: note = sgRNA solution for Cas9 from ID47 Clade 7
  source 1..90: mol_type = other RNA
gtttttgtactcttaatggaaacattaagaatctacaaaaataagactttatgtcgagtttcccgtcatcattgtatggcgggttttttt

SEQ ID NO: 452 - RNA, 88 nt, synthetic construct
  misc_feature 1..88: note = sgRNA solution for Cas9 from ID48 Clade 7
  source 1..88: mol_type = other RNA
gtttttgtactctcgagaaatctgagaatctacaaagataaggctttatgccgaatttaccacctgacttttgatcaggtggtttttt

SEQ ID NO: 453 - RNA, 86 nt, synthetic construct
  misc_feature 1..86: note = sgRNA solution for Cas9 from ID50 Clade 7
  source 1..86: mol_type = other RNA
gtttttgtactctcaagaaattgcagaagctacaaagataaggcttcatgccgaaatcaacaccctgtctcttggcggggtgtttt

SEQ ID NO: 454 - RNA, 90 nt, synthetic construct
  misc_feature 1..90: note = sgRNA solution for Cas9 from ID51 Clade 7
  source 1..90: mol_type = other RNA
gttttgttaccatatggagaaatttatatgatctaacaaaacaagggtttatcccggaatcaagttccaagtatatgcttggagcttttt

SEQ ID NO: 455 - RNA, 85 nt, synthetic construct
  misc_feature 1..85: note = sgRNA solution for Cas9 from ID52 Clade 7
  source 1..85: mol_type = other RNA
gtttttgtactctcagaaatgagcctacaaagataaggctttatgccgaattcaagcaccccatgttttgacatggggtgctttt

SEQ ID NO: 456 - RNA, 82 nt, synthetic construct
  misc_feature 1..82: note = sgRNA solution for Cas9 from ID56 Clade 7
  source 1..82: mol_type = other RNA
gttttagtacccttaaggaaacttaaggatctactaaaataaggctttatgccgaaatcagcccctcactggggcttttttt

SEQ ID NO: 457 - RNA, 91 nt, synthetic construct
  misc_feature 1..91: note = sgRNA solution for Cas9 from ID60 Clade 7
  source 1..91: mol_type = other RNA
gttttggcactctttcgaaaggagaacctgtcaaaacaagggtttatcccgaactcagaaccccattttactggggttcttttctttttct

SEQ ID NO: 458 - RNA, 99 nt, synthetic construct
  misc_feature 1..99: note = sgRNA solution for Cas9 from ID61 Clade 7
  source 1..99: mol_type = other RNA
gttttagtactctgttagaaataatagaatctactaaaataaggccatagtgccgtatttgatctattaggatctgaccccgcatatgcggggtttttt

SEQ ID NO: 459 - RNA, 107 nt, synthetic construct
  misc_feature 1..107: note = sgRNA solution for Cas9 from ID63 Clade 8
  source 1..107: mol_type = other RNA
gttttagaccaatgtagaaatacattggtaagttaaaataagcttaaagcgtaaaagttggtcatattagacctccaacctgtagactatatgtctacaggtttttt

SEQ ID NO: 460 - RNA, 96 nt, synthetic construct
  misc_feature 1..96: note = sgRNA solution for Cas9 from ID64 Clade 9
  source 1..96: mol_type = other RNA
gttttagagctgtgttggaaacaacacagcgagttaaaataaggctttgtccgtacacaacttgtaaaagtggcacccgattcgggtgcatttttt

SEQ ID NO: 461 - RNA, 89 nt, synthetic construct
  misc_feature 1..89: note = sgRNA solution for Cas9 from ID65 Clade 9
  source 1..89: mol_type = other RNA
gttttagagttatggaaacatagcaaagttaaaataaggctttgtccgtaatcaacctgaaaaggggagcaccgaatcggtgctttttt

SEQ ID NO: 462 - RNA, 98 nt, synthetic construct
  misc_feature 1..98: note = sgRNA solution for Cas9 from ID66 Clade 9
  source 1..98: mol_type = other RNA
gttttagagctatgctgagaaatcaatatagcaagttaaaataaggctttgtccgtcatcagcttttttaaagcagcgctgttctcggcgcttttttt

SEQ ID NO: 463 - RNA, 93 nt, synthetic construct
  misc_feature 1..93: note = sgRNA solution for Cas9 from ID67 Clade 9
  source 1..93: mol_type = other RNA
gttttagagctatgttggaaacaacatagcaagttaaaataaggtttaaccgtaatcaactttttagtggcgctgtctcggcgctattttttt

SEQ ID NO: 464 - RNA, 107 nt, synthetic construct
  misc_feature 1..107: note = sgRNA solution for Cas9 from ID68 Clade 9
  source 1..107: mol_type = other RNA
gttttagagctgtgctggaaacagcacagcacgttaaaataaggcagtgatttttaatccagtccgtattcagcttgaaaaagtgagcaccgattcggtgctttttt

SEQ ID NO: 465 - RNA, 93 nt, synthetic construct
  misc_feature 1..93: note = sgRNA solution for Cas9 from ID70 Clade 9
  source 1..93: mol_type = other RNA
gttttagagctgtgttggaaacaacacagcaagttaaaataaggtttatccgtattcaacttgaaaaagtgcgcaccgattcggtgctttttt

SEQ ID NO: 466 - RNA, 102 nt, synthetic construct
  misc_feature 1..102: note = sgRNA solution for Cas9 from ID71 Clade 9
  source 1..102: mol_type = other RNA
gttttagagctatggaaacatagcaagttaaaataaggctttgtccgttatcaacttttaattaagtagcgctgtttcggcgctttttttgtgcactttttt

SEQ ID NO: 467 - RNA, 125 nt, synthetic construct
  misc_feature 1..125: note = sgRNA solution for Cas9 from ID77 Clade 10
  source 1..125: mol_type = other RNA
gtctcaggtagatgtcgaaagacatctacgagttgagatcaaacaaagcttcggctgagtttcaatttctgagcccatgttgggccatacatatgccacccgagtgcaaatcgggtggttttttt

SEQ ID NO: 468 - RNA, 140 nt, synthetic construct
  misc_feature 1..140: note = sgRNA solution for Cas9 from ID78 Clade 10
  source 1..140: mol_type = other RNA
gtttcagaaggatgttgaaaaacatcctgatttgaaatcaaacaatgcactttgtgcggagtttatccacttgtcccagctatctgggcaatacatagtgaaagaggaaccgacccttaatgggacggctcctctttttt

SEQ ID NO: 469 - RNA, 112 nt, synthetic construct
  misc_feature 1..112: note = sgRNA solution for Cas9 from ID79 Clade 10
  source 1..112: mol_type = other RNA
gtttgagagatatgtgaaaatatcgagttcaaataacgtttttacgaagtcgccggttcgtccggcagcacagtgtgtgctatgacctgcttaggcaggtcttttctttttt

SEQ ID NO: 470 - RNA, 119 nt, synthetic construct
  misc_feature 1..119: note = sgRNA solution for Cas9 from ID80 Clade 10
  source 1..119: mol_type = other RNA
gttttaggtggttgttgaaaaacaaccagattttaaaatcaaacaatgtatcttttagatactaagtttcaatgcggtttattaccgtcctgcctcagctctatagcggaggttttttt

SEQ ID NO: 471 - RNA, 118 nt, synthetic construct
  misc_feature 1..118: note = sgRNA solution for Cas9 from ID81 Clade 10
  source 1..118: mol_type = other RNA
gtttgagagtagtgtaagaaattacactacgagttcaaataagaatttatcaaaatcgtccctttttgggactgctcattgtggagcatcaaggcttaacattgttaagccttttttt

SEQ ID NO: 472 - RNA, 119 nt, synthetic construct
  misc_feature 1..119: note = sgRNA solution for Cas9 from ID87 Clade 10
  source 1..119: mol_type = other RNA
gtttgagagtagtgtaagaaattacactacgagttcaaataaaaatttattctaaccgttgctttggcaacatcacagtgtgtgagttgagacctgcttttgcaggtctttttattttt

SEQ ID NO: 473 - RNA, 99 nt, synthetic construct
  misc_feature 1..99: note = sgRNA solution for Cas9 from ID94 Clade 11
  source 1..99: mol_type = other RNA
gtttcaaattcaatgaaaattgaatttgaaataaggctgttccttcgttagttcagtcgattgctcctccggtattgcttttgcatgccggagtttttt

SEQ ID NO: 474 - RNA, 99 nt, synthetic construct
  misc_feature 1..99: note = sgRNA solution for Cas9 from ID97 Clade 11
  source 1..99: mol_type = other RNA
gctggggttcagttccgaaaggaactgaacctcagtaatcaccggctcgtttccggtgaagaatgctccagtcggcgcccactgggcgtcgacttttct

SEQ ID NO: 475 - RNA, 135 nt, synthetic construct
  misc_feature 1..135: note = sgRNA solution for Cas9 from ID102 Clade 12
  source 1..135: mol_type = other RNA
gtttcagtggttggagaaattcgataccctgaaatcaacaaaattaaagattgaatcgtttttctatgctcgtcttaatagcgagcatataacgatttcaaaatctatcgttacagtgatttagaaactcacact

SEQ ID NO: 476 - RNA, 117 nt, synthetic construct
  misc_feature 1..117: note = sgRNA solution for Cas9 from ID83 Clade 1
  source 1..117: mol_type = other RNA
gctctggttggccgggagaaatccttgccgtatcagagcaaggttgcgtcctgccgcgaggtacctggaaacagtagcctctgaggacgccccctgttgggggcgtttttatttttt

SEQ ID NO: 477 - RNA, 96 nt, synthetic construct
  misc_feature 1..96: note = sgRNA solution for Cas9 from ID84 Clade 1
  source 1..96: mol_type = other RNA
gttgtgatttgctttgaaagaagcaattcacaataaggattattccgttgtgaataacattttaagcggcccccaaaaggggtcgtttcttttttt

SEQ ID NO: 478 - RNA, 87 nt, synthetic construct
  misc_feature 1..87: note = sgRNA solution for Cas9 from ID85 Clade 5
  source 1..87: mol_type = other RNA
gttttcggcatctctcgaaagagagatgtcgaaaataaaggtttggggctgaacctgcaaagcactatcctgaaaaggttatcttct

SEQ ID NO: 479 - RNA, 99 nt, synthetic construct
  misc_feature 1..99: note = sgRNA solution for Cas9 from ID88 Clade 5
  source 1..99: mol_type = other RNA
gttatagtttccctcagaaatgaaggttactataataaggctaacaaccgtaaggtatcccccgtcagtgcccgtcattgacgggggtatccttttttt

SEQ ID NO: 480 - RNA, 108 nt, synthetic construct
  misc_feature 1..108: note = sgRNA solution for Cas9 from ID91 Clade 3
  source 1..108: mol_type = other RNA
gttgcggttggcccctggaaacaggggccacccgttaacaagcaccttgagtgcaaaaaatttctcctctggagaagcgtggcgggctgcggcccgccatttgcgttt

SEQ ID NO: 481 - RNA, 127 nt, synthetic construct
  misc_feature 1..127: note = sgRNA solution for Cas9 from ID93 Clade 3
  source 1..127: mol_type = other RNA
gctgcggactgaggccgttgaaaagcggcctctattcgcaagcaataggaccctttgtgtgggctcggcatcccaaggtcactgccggtattgttcgattcgaagccccgccacggcggggcttttt

SEQ ID NO: 482 - RNA, 98 nt, synthetic construct
  misc_feature 1..98: note = sgRNA solution for Cas9 from ID139 Clade 3
  source 1..98: mol_type = other RNA
gttgtggtttgatgtaagaaattacatcttatcacaataaggctatatgccgaaggatgtaaatcctatactcccgcttcggtgggagtttggttttt

SEQ ID NO: 483 - RNA, 110 nt, synthetic construct
  misc_feature 1..110: note = sgRNA solution for Cas9 from ID96 Clade 5
  source 1..110: mol_type = other RNA
gttatagccccctttctgaaaagaaacgaatgggctataataaacaggttatggttcctgtgcaaggctctgaacactgttcatccttaaaaaaaccaattttctttttt

SEQ ID NO: 484 - RNA, 90 nt, synthetic construct
  misc_feature 1..90: note = sgRNA solution for Cas9 from ID98 Clade 3
  source 1..90: mol_type = other RNA
gttccggtcagagcacaaagaaatttgtgctttgaacgctaacaagcatcagatgcaccaaatgcggggccgctatatgcggcccctttt

SEQ ID NO: 485 - RNA, 140 nt, synthetic construct
  misc_feature 1..140: note = sgRNA solution for Cas9 from ID101 Clade 3
  source 1..140: mol_type = other RNA
gctgcggtttgcggccaagaaattggctcgcttaccgcaggcaaagcttaagcgttccaagagcgagggctgggcgcccctccgacgcgatatacgcccaactttcaagcccttgccggttacgccggcaggggctttcc

SEQ ID NO: 486 - RNA, 121 nt, synthetic construct
  misc_feature 1..121: note = sgRNA solution for Cas9 from ID103 Clade 2
  source 1..121: mol_type = other RNA
gttgtggattccgggcaggaaactgccttggtttccataacaagaaggtgaaaccttcgcaggatatcccgaaagggtaaaccgcacgcctccagatcgacagatctgggggcgtattgtt

SEQ ID NO: 487 - RNA, 96 nt, synthetic construct
  misc_feature 1..96: note = sgRNA solution for Cas9 from ID104 Clade 1
  source 1..96: mol_type = other RNA
gttgtgaattgctttcgaaagaaagcaattcacaataaggattattccgttgtgaaaacatttagtcgcctcgtctatctacggggcatttttttt

SEQ ID NO: 488 - RNA, 97 nt, synthetic construct
  misc_feature 1..97: note = sgRNA solution for Cas9 from ID105 Clade 2
  source 1..97: mol_type = other RNA
gttgtggattgattagaagaaattctaatctttccacaataaggctataggccgtaggagatgatttcctttgcccttgcttcggtaggggcttttt

SEQ ID NO: 489 - RNA, 118 nt, synthetic construct
  misc_feature 1..118: note = sgRNA solution for Cas9 from ID106 Clade 10
  source 1..118: mol_type = other RNA
gtttgagagatatgtaagaaattacatatcgagttcaaataacgtttttacgaagtcgccggttcgtccggcagcacagtgtgtgctatgacctgcttaggcaggtcttttctttttt

SEQ ID NO: 490 - RNA, 120 nt, synthetic construct
  misc_feature 1..120: note = sgRNA solution for Cas9 from ID107 Clade 8
  source 1..120: mol_type = other RNA
gttttggagcagtgtcgtgaaaacagcactgcgagtcaaaatacggctttgccaaacttgcctcccttcggaggcgtctcgtaggagacaatttgaagcccctttaggggcttcattttt

SEQ ID NO: 491 - RNA, 125 nt, synthetic construct
  misc_feature 1..125: note = sgRNA solution for Cas9 from ID108 Clade 8
  source 1..125: mol_type = other RNA
gttttggagcagtggaagaaatttcactgcgagtcaaaatacggcgcttgccaaaaatgcttcggcgccacgtaggtggcaatttcgactccaggcaaggaacccttctggggtttcttgttttt

SEQ ID NO: 492 - RNA, 112 nt, synthetic construct
  misc_feature 1..112: note = sgRNA solution for Cas9 from ID109 Clade 10
  source 1..112: mol_type = other RNA
gtttgagaatgatgtaatgaaaattacatcatgagttcaaataaaagtttactcaaatcgcccgaaagagcccacattggtggactaaacaaatcttcggatttgttttttt

SEQ ID NO: 493 - RNA, 125 nt, synthetic construct
  misc_feature 1..125: note = sgRNA solution for Cas9 from ID112 Clade 10
  source 1..125: mol_type = other RNA
gtctcaggtagatgtcgaaagacatctacaagttgagatcaaacaaagcttcggctgagtttcaatttctgagcccatgttgggccatacatatgccacccgagtgcaagtcgggtggctttttt

SEQ ID NO: 494 - RNA, 97 nt, synthetic construct
  misc_feature 1..97: note = sgRNA solution for Cas9 from ID116 Clade 7
  source 1..97: mol_type = other RNA
gttttagcactgtacaatgaaaattattgtcgtgctaaaataaggcgctgctaatgcagctgccgcatccgccagagcatttatgctctggcttttt

SEQ ID NO: 495 - RNA, 108 nt, synthetic construct
  misc_feature 1..108: note = sgRNA solution for Cas9 from ID119 Clade 9
  source 1..108: mol_type = other RNA
gttttagagctgtgctggaaacagcacagcacgttaaaataaggcagtgatttttaatccagtccgtattcagcttgaaaaagtgagcaccgattcggtgcttttttt

SEQ ID NO: 496 - RNA, 91 nt, synthetic construct
  misc_feature 1..91: note = sgRNA solution for Cas9 from ID120 Clade 9
  source 1..91: mol_type = other RNA
gttttagagctatgttggaaacaacgtagcaagttaaaataaggctagtccgttatcaacttgaaaaagtggcaccgagtcggtgcttttt

SEQ ID NO: 497 - RNA, 99 nt, synthetic construct
  misc_feature 1..99: note = sgRNA solution for Cas9 from ID121 Clade 9
  source 1..99: mol_type = other RNA
gttttagagctgtgctgtgaaaacaacacagcgagttaaaataaggctttgtccgtacacaacttgtaaaagtggcacccgattcgggtgcgttttttt

SEQ ID NO: 498 - RNA, 90 nt, synthetic construct
  misc_feature 1..90: note = sgRNA solution for Cas9 from ID122 Clade 7
  source 1..90: mol_type = other RNA
gtttttgtactctcaaggaaacttgcagaagctacaaagataaggcttcatgccgaattcaacaccctgtcatttatggcggggtgtttt

SEQ ID NO: 499 - RNA, 93 nt, synthetic construct; identical to SEQ ID NO: 465
  misc_feature 1..93: note = sgRNA solution for Cas9 from ID123 Clade 9
  source 1..93: mol_type = other RNA

SEQ ID NO: 500 - RNA, 89 nt, synthetic construct
  misc_feature 1..89: note = sgRNA solution for Cas9 from ID124 Clade 7
  source 1..89: mol_type = other RNA
gtttttgtactctcaagaaattgcagaagctacaaagataaggcttcatgccgaaatcaacaccctgtcattttatggcagggtgtttt

SEQ ID NO: 501 - RNA, 91 nt, synthetic construct
  misc_feature 1..91: note = sgRNA solution for Cas9 from ID125 Clade 7
  source 1..91: mol_type = other RNA
gtttttgtactctcaagagaaatcttgcagagcctacaaagataaggctttatgccgaaatcaagcaccccgtttcgtacggggtgctttt

SEQ ID NO: 502 - RNA, 87 nt, synthetic construct
  misc_feature 1..87: note = sgRNA solution for Cas9 from ID126 Clade 7
  source 1..87: mol_type = other RNA
gtttttgtactctcagaaatgcagaagctacaaagataaggcttcatgccgaaatcaacaccctgtcattttatggcagggtgtttt

SEQ ID NO: 503 - RNA, 118 nt, synthetic construct
  misc_feature 1..118: note = sgRNA solution for Cas9 from ID127 Clade 10
  source 1..118: mol_type = other RNA
gtttgagagttgtgtaagaaattacacaacgagttcaaataagaattcatcaaaatcgtcccttttgggaccgctcattgtggagcatcaaggcttaacatggttaagcctttttttt

SEQ ID NO: 504 - RNA, 129 nt, synthetic construct
  misc_feature 1..129: note = sgRNA solution for Cas9 from ID131 Clade 9
  source 1..129: mol_type = other RNA
gttttagagctatgttgttttgtatgacgaaagttatacaaaacaacattagcgaagttaaaataaggtttaatccgtaatcaacaagttttatcttgcgcgcgccgtttcggcgctttttttgttttt

SEQ ID NO: 505 - RNA, 124 nt, synthetic construct
  misc_feature 1..124: note = sgRNA solution for Cas9 from ID132 Clade 10
  source 1..124: mol_type = other RNA
gtttgagaagtgtgttgttcgaaagaacaacacacttaagttcaaataaaaatttattctattgaccagaaatggcagcccgctgtgggcattttaacttcatttttttaaatgaagttttttt

SEQ ID NO: 506 - RNA, 121 nt, synthetic construct
  misc_feature 1..121: note = sgRNA solution for Cas9 from ID136 Clade 9
  source 1..121: mol_type = other RNA
gtttgagagtaatgtaatctagaaatagattacattatgagttcaaataaaaatttattcaaaccgccagtaatggctaacctaagttgtttaggcaaaactcactaaggtgagttttttt

SEQ ID NO: 507 - RNA, 123 nt, synthetic construct
  misc_feature 1..123: note = sgRNA solution for Cas9 from ID138 Clade 10
  source 1..123: mol_type = other RNA
gtttgagagtagtgtaattctgaaaagaattacattacgagttcaaatacaaattaatttacaatgccttcgggctgcccgacgtagggcacctactctcaattcttcggaattgagtttttt

SEQ ID NO: 508 - RNA, 87 nt, synthetic construct
  misc_feature 1..87: note = sgRNA solution for Cas9 ORF from ID141 Clade 7
  source 1..87: mol_type = other RNA
gttttagagctggaaacagcgagttaaaataaggctttgtccgtacacaacttgtaaaagtggcacccgattcgggtgcgttttttt

SEQ ID NO: 509 - RNA, 79 nt, synthetic construct
  misc_feature 1..79: note = sgRNA solution for Cas9 ORF from ID142 Clade 7
  source 1..79: mol_type = other RNA
gttttagtacacgaaagaatctactgaaacaagactatatgtcgtgtttatcccactaatttattagtgggattttttt

SEQ ID NO: 510 - RNA, 82 nt, synthetic construct
  misc_feature 1..82: note = sgRNA solution for Cas9 ORF from ID140 Clade 9
  source 1..82: mol_type = other RNA
gttttagagtcagaaatagcaagttaaaataaggttttaaccgtaatcaactgtaaagtggcgctgtttcggcgcttttttt

SEQ ID NO: 511 - protein, 1068 aa, Bacillus cereus
MKYVLGLDIGIASCGWAVINQEKHRIEDLGVRIFDKAENPKDGKSLATPRRDARSTRRTLRRKKHRMQRIKILLVKHGLLSKTEIDHLYESATEIDVWYLRLNALERRLNPKEFARVLIHLAKRRGFKSNRKETTLSENGQILENISENLQIMEQKNYRTVGEMILKDKRFENHKRNKDGTYIGTVTRQQLQEEIQMIFNAQRLYKNNHATEKFESSYLEIWASQRPYASKDQIEKMIGYCTLEPKEKRVPKASWSFQYFVALQTINNLRLISKDRIEELSFEEKKRIMNLALEKSIVKYIDIRKLLSVPNEFQFNSLSYSADIVDTTVENKKCIELKEYHSINKVYKQIYGQNALNLLPKDYDTIAYGLTIFKDDKDILEYLQNKYVNAKGKPISNLANKTYDDTFIQVLLTLNFSKMGHLSFKALKNIIPFLEEGLSYDKACEKAGYNFKGASYTKKTKYLPVIPQNTNPVVHRALSQTRKVINAIIKKYGSPNAIHIETARELSKTFQERKEIDSMYQDNSKKNEHAICKLKELGNIKPSGINIVKFKLWNEQDGRCMYSGKYIEPHRLFEEGYTEVDHILPYSRSLDDSYNNKVLTLGTENQRKGNKTPYEYMRNNSIWDEFETRVQSNKKINKKKQQKLLLQNFSHAREQEFIERNLNDTRYATIYLSSLIQQHLIFSESSREKKVHTVSGIITSHLRSRWGFNKDRKEGHIHHALDAVIVAVTSDHMIQRVTKYYKLKELNRNIQAKRMQFPEPWEGFRLELEARVSPNTQQYLKGIRFKNYADVDLSEIKPIFVSRMPKRSITGELHQETIRKFLGYNEKGKVLTATKTKLEDIPFDANGDFPMFGKETDLYTYNAIKERYLSHKKDKRKSFQEPLYKPTKSGGIGPLIKSIKIMDTRTIVNPVNQGKGVVYNSKIARTDVFKKGEKYYLIPIYTIDLMKNILPQKAITAGKGYEDWTTIDPSFTFLFSLFPNDLIQIVPSKNKTIKARTTVSKKEVLLPSLTGYFKGVHSGTAGITVETHDGSIIANVGSKQLLSFEKYQVDVLGHYTKIKKEKRIGMAI

SEQ ID NO: 512 - protein, 1143 aa, Sulfurovum lithotrophicum
MSKKILAVDLGITSFGFSVLKEVEENSYINIDNSVIMRDAPYDKDGKSKQTSRREQASQRSLGEKRRQRIKEVAKTFNSFGVLSYDECMQVQKNNTITDKWKLRAEDALYRILSPQELFAIMAHMAKHRGYKSIATEDLLYELELELGLVEEQTEEEDSKTDEKRQVYAALGRLKRLKETYKVDTIAQVIHKAIQEGKFRSYRNHDDYEKMVRREDIEYEIETIIKKQCELGAFAFDGERCLQFIEVLHEAITDQIMPENDESLFGQCSYYANEKAAPRYSYLYDIYRLYKTLADLKIDYYDLTQEDRDKIVDFVIQKIAKGKNLKQVYYKDIRKILGLSNEQKLYGKDDQVVIKGKSSQRTLIKFFFLNEIGKFPTLMQKILSHTEALNIFAQLAEVVRFHKTPKLALAALHELLEPYGIEVEATELLALIKSKSAGTLSISHRFILDALPYFNEGKDESFVKEILGISPSEDYNTYPKSLKYLHLGKDNLFEKTQNAINNHAVKSLASWALQNIADLSWRYGSFDEIIIESARDVLPQVIKDAIEKSMKERGKEIDKIIESYKKEFPSMDRKMARKIKLLESQKFIDIYSGEVINISDLFNGRADIEHVVPRSLGGLSTDYNLIIANSDTNMQKSNRLPMDWLSGDIEYVKRVEMLFNGHKINWKKRKNLLATSLDEIYVEVQDTKALRATSYLESLVSEVLKMYYPFPNKEHRKNGVAVRNVPGKTTSKTRSWLGIKSKSRDTNFHHAEDALILATLNRGWQNRLHRMLKENYGKSEEELQLLWQKYTPHIEGVAIAGYIKEAYERFMSKGEESLWYRDMFGSIRSVSYWVSKKPLSASSHKDTVYSSRHRNPNNPDKVVPTVRKSILGAFNGLDILKNRHKWNKEEFLKVYDKEIRQKLWLYRLDNTNDPVYRAIEERANTIGNLIEIYIYKDPQHDKAVDEVYQEVIRSLLQKPITAAGKPVYKTVFVDDTFLPIEIERGESNKVLVRTDDNFLAVMFEKGEKEKLNISKVDVNSLHRLKKENAMIVYLNEVIYLFNKKKIIHYGALRSFKILSSGARYISLFNPRFPANPSSQPKKFTDGKSIKSISIGSTTGVIKVHLDLNGKMKSYQKFGFIPKELEAQFLKESGYGIVEDDTNH

SEQ ID NO: 513 - protein, 1133 aa, Alloscardovia omnicolens
MTLNNYKIGIDVGLYSTGLAAIEVDSNGEPVRILNMQSVIHDGGVDPNSNKTADTRKMISGVARRTRRMRRRRKSRLANLNKYLEELRLPLENYGDDTFEPWMLRACLADGYIQDEEQRKYMLSVAFRHIARHRGWRNPYKSVKSLYNVNLDDLSERYDDLCEACQVNPEDGLTPAQIIGDYLASKDGQVAPRIRHSGSKSEAFAPLPQKLMQEDNAYEVRYICEQQGVDDETCRKLIDKIFYAVSPRGSASERVALDDLTHEKRATKASLAFQKFRIIAALSFLKLAVGGQQRPLTVEEKNTAFDILSSMDSKTRPTWADVAAALGVNRRDIKGIGGIQDDGDRISNRAPVMDSYFALIESSGVLGKLVKHDIMPWWRDASEDDQERLLELLGNNVDIDSIRDDMSYSNAFELIDSFDDDQLGVIDNIKLPAGRAAYSVSACQALTVRMLSTTDNLHDARKTVYGVTDNWKPAQEPIGFPIGNPSADRVLKIVNRYLMNCTARWGTPVSVNIEHAREGFSSAKVARAYQKDAEAYATNRSAIFDKIKDLYPDFNRFSDSAMKRWEAIQRQNGECLYCGATLKFTTCELDHIVPRKGVGATNTKTNLAAVCTDCNRAKSKKLFSLWCHDQYAVSKGITVAKAVARVEMFTFPAGTLSAANAKRFKEAVKSRLTQMTEDEAPDNRSIESVSWMADELHKRIDWYYNSQRYTATSDIPERAVKVFVYSGLSTSLARRFSGIEKQIHFAGPSGKTRLDRRHHAVDAAVIALMQHNVAEVLVDKNELYKAQRYSQKEDGADWREYRGKDEEQQFLYGRWLGNIHVLLDLINDALDDDRVQILRNLRLELGNSRAHEDTIHKLLRVRLGDKVEASLVQRASTPALFTALTRCDDFDEKTGLPENRERHIVVNGVHYGSEDEIAFFEKNAAQIMVHNGSAEIGDGFHHARIYLCDKINKSGKKTGEFYGMIRVFAADLAKSRNDDLLTVPLSESSLSMRYGDPSTVKAIREGHARFVGHLFVGDELRLDLSQTDYTGQVQEFAQVLANVAEAEVYTTWVVDGFCDPAKLRLRPSYVSSEGVKSFDEAEQSRLLKVIDKGWRPAINALSAYYPTVVRRNGLGEIRWKSNAGLPMSYRWHE

SEQ ID NO: 514 - protein, 1129 aa, Streptococcus infantarius
MSNGKILGLDIGVASVGVGIIDSKTGNVIHANSRLFSAANAENNAERRGFRGARRLTRRKKHRVKRVRDLFEKYDISTDFRNLNLNPYELRVKGLTEQLTNEELFAALRTIAKRRGISYLDDAEDDSTGSSDYAKSIDENRRLLKTKTPGQIQLERLEKYGQLRGNFTVYDENGEAHRLINVFSTSDYKNEARKILETQSNYNKQITDEFIEDYIEILTQKRKYYHGPGNEKSRTDYGRFRTDGTTLENIFGILIGKCSFYPEEYRASKASYTAQEFNFLNDLNNLKVPTETGKLSTEQKEYLVDFAKKSKALGASKLLKEIAKIVDCSVDDIKGYRVDNKDKPDLHTFEPYRKLKFNLSSIDIDELSRETLDKLADILTLNTEREGIEDAIKRNLPSQFTEEQISEIVQIRKNQSSAFNKGWHSFSAKLMNELIPELYVTSEEQMTILTRLEKFKVNKKSSKNTKTIDEKEITDEIYNPVVAKSVRQTIKIINAAVKKYGDFDKIVIEMPRDKNAEDEKKFIDKKQKENKKEKDDSLKRAAFLYNGTDNLPDGVFHGNKELKTKIRLWYQQGERCLYSGKLISIHDLVHNSNKFEIDHILPLSLSFDDSLANKVLVYAWTNQEKGQKTPYQVIDSMDTAWSFREMKDYVLKQKGLGKKKCEYLLTTENIDKIEVKKKFIERNLVDTRYASRVVLNSLQTALKELGKDTKVSVVRGQFTSQLRRKWNIDKSRETYHHHAVDALIIAASSQLKLWQKQENPMFESYGENQVVNKETGEILSISDDKYKELVFQPPYQGFVNTISSKGFEDEILFSYQVDSKFNRKVSDATIYSTRKAKLGKDKKDETYVLGKIKDIYSQDGFDTFIKRYKKDKTQFLMYQKDPLTWENVIEVILRDYPSEKLSEDGKKTVKCNPFEEYRRENGLICKYSKKGNGTPIKSLKYYDKKLGNCIDITPEKSKNRVVLRQISPWRADIYFNLETLKYELMGLKYSDLSFEKGTGKYHISQEKYDAIREKEGIGKKSEFKFTLYRNDLILIKDTLNNCERMLRFGSKNDTSKHYVELKPLEKGTFDSEEEILPVLGKVAKSGQFIKGLNKPNISIYKVRTDVLGNKFFIKKEGDKPKLDFKNNNK

SEQ ID NO: 515 - protein, 1509 aa, Bacteroides coprophilus
MKKTLGLDLGTNSIGWAVINSNIDSEGKEKLVGISSCGSRIIPMDATTLGDFGKGNTKSPVAERTRLRGIRRLLERSLLRRERLHRVLSVMGFLPEHYASQLDRYGKFLPETEPKLAWYKDDSGRYQFLFQKSFHEMLEDFRQHQPELVAGEKKIPYDWTIYYLRKKALSQEITKEELAWILLNFNQKRGYYQLRGEEEQEENNKSVEYHALKVVSVEDSGERKGKDIWYNVTLENGWVYRRASNIPLDWTGKVKEFVVTTELDDAGNPKKDKEGNVKRSFRAPKEDDWGLLKTRTQAQIDESGKTVGTYIYESLLCMPNQKIRGKLVRTIERKYYKDELRQILVKQSEFHAALQDHNLLLSCIEELYPNNEAHRRLLSASSFIYFLIEDILFYQRPLKSQKGLIDNCPYESHIYKDKKDGSLHHVPLKCVSKSHPLFQEFRLWQFLSNLRIYQRERMMDGSLKLDVDVTREFLPSEEDYVKLFDWLNERKEISQKFLLAYKPFGLKKNEQANYRWNYVEDKSYPCNETRAEIKSRLSKAGVPEEFLTEEKEEALWHILYSISDKKELTKALGTFAAKNCLNESFVEVFAKIPPFESNYAAYSLKAIRKLLALMRMGKYWNEQAIDRQTRDRIEKILTGEYDETIRSRVREKAMLLTDISSFRGLPLWLACYIVYDRHSESKELVKWETPADIDHFLSKFKQNSLRNPIVEQVITESLRTVRDIWKQEGKIDEIHVELGREMKNPAKERARITAQVQENENTNLRIKALLAEFMNPEFEIENVHPYSPGQQEILRIYEDGVLSGIAEKDLPDDITAILKKFRENDVKKRPTTSEVLRYKLWLEQRYRSPYTGRVIPLGKLFTPAYEIEHVIPQSRYFDDSISNKVICESAVNKLKDNCLGYEFIKKHSGEMVELGNGETVPVFSVEEYERFVKESYFGNSKKMKKLLLEDIPDSFIERQLNDSRYISRVVTSLLSNLVCEEGEQDGLSKNVIVCTGGITDRLKKDWGVQEVWNRIILPRFLRLNEITGRTDFTSTSVNGHLLPALPLYLQKGFNKKRIDHRHHAMDAIVIACANRNIVNYLNNSSARKNSEISRYDLQRLLCEKVKTDANGNYKWILRKPWETFTQDVYAALTNIVVSFKQNLRVINRTTNYYQHYNEAGEKRMIPQTKGDRWAIRKPMHKDTVYGEVNLRKEKTLPLRDVVKNPSIVVDKSLKNKLYELLKSQYDLKAIAKYFETHQDVWADVNLKKIKVYYFTKETNERFFATRKSLDPSFDQKKIEEEVTDTGVQKILLHHLQQNNNDPDMAFSPDGIDRMNQNMTILNDGKWHQPIYKVRTYEKADKFAVGESGNKAKKFVEAAKGTNLFFAVYESVQEDEAIGKQVCKRTFATIPLNEVIKRKKQGLPAAPEDLNGNLPKFVLSPNDLVYLPTEEERNSSRIIQPLDRERIYKMVSSSGSQCFFIKVFVANSIWDKNEYSSLNKMERAITNEMIKEICVPIKIDRLGNVSLIQI

SEQ ID NO: 516 - protein, 1375 aa, Prevotella sp.
MKKILGLDLGTTSIGWALVNESENKDEQSSIVRLGVRVIPLTVDEKGNFEKGKAITTNADRQQVHAARINLQRYKLRRENLRDCLQKQGWIGSEPMCEDGKSSTFETYKLRAKAAVEEVSLHEFARVLFMLNKKRGYKSNRKANDKEEGKLFDGMTIAKKLYEEHLTPAEYSLQLLNTGRKFTPEYYRSDLIEEFEKIWNEQQKYYPEILTDEFKQQLEGKAKSNTSKLFLGKYGIYSADTKGLDRRLQPLKWRVEAMKQQVDKDVLAFVISDLKGQIANTSGLLGAISDRSKELYFSKQTIGQYLWASLQENPHISIKNQPFYRQDYLDEFEKIWETQATYHKELTSELKQEIRDIIIFYQRPLKSKKNLIAVCELEQRKVKVTVDGKEKEITIGPKIAPKSSPMFQEFRIWQNLNNILLLDHETNSKRPLYEEERNLLYEELSVKEKLSKTEALKVLGKKSKQWDLNYKELEGNRTQAVLYDCYNRIIVMSGHEECNFKKLKASDIRHYVKMIFKNLAFNTDILCFDSSLKGHELERQPMCQLWHLLYSYEGDNSRTGNDALLRKLETSFGFPKEYAAVLADVIFEDSYGNLSVKAMRNILPHLQAGKDYSQACEEAGYKHSRRSLTKEELNQKVYKEKLELLPKNSLHNPVVEKILNQMVNVINAVIEEYGKPDEIRIELARDLKIGAAERENMTRSINQGNAENKRIREILEKEFALSYLSRNDIIKYKLYEELKSNGFKTLYSDTYISKDKLFSKDFDIEHIIPKARLFDDSLSNKTIEARDVNIAKSNKTAFDFILERYGEQGVKTYKTKLLRLLEDGAISNKKYNNLLKTEADIPSGFIDRDLRNTQYIAKKAYEILSELVKIVTPTTGSVTNRLREDWQLVDVMKELNFEKYQKLGLADVIEDRDGRKVKRIKDWTKRNDHRHHAMDALTIAFTKPSYIQYLNNLNARSDKSSSIYGIEVKELHREEGKFRFNAPLPINEFRAEAKRHLKSVLVSIKAKKKVMTQNVNKIKTKHGIIKKVQLTPRGELHNATYYGTKKRPLVRMVKVGAALDEATIKRVCSPAIRAALLKRLNAYNGDAKEAFTGRNSIDKNPIYLDIEQTKLVPVLVKTIEWGMYHPIRKRITPDLKIDKVIDKGIREKLKARLAEFNGDAQKAFSNLDENPIYMDEAKRITLKRVSIEGVLSAIPLHTLKDKAGKPVIGSDGKPVFGDYVQTSNNHHIAFYIDDKGNLQDNPVSFFEAAERKSQGVPVIDRRYNCDKGWHFVFTMKQNEYFVFPNEATGFIPSEVDLLDEANYCIISPNLYRVQKLSKASGRDYWFRHHLETMLNDDLRLKNSTFKRIQSLKGLEDIVKVRINSIGKIVAVGKYD

SEQ ID NO: 517 - protein, 1494 aa, Prevotella melaninogenica
MKTILGLDLGTNSIGWAKVCVNDNGNYTREIKLGSRIIPMSQDTLSNFDKGVTESPTAARTGFRGIRRIRERALQRRERLHRVLHVMGFLPLHYENAIGWNREEATTYGKFLDNGEPKLAWERQEDGSMRFLFMDSFYEMMADFAKYQPGMVADGRKIPLDWTLYYLRKKALTQAIRKEELAWILLNFNQKRGYYQLRGEEEEENSTKHEEYYELKVVSVEAAEEGKGGNTWYNVTLENGWIYRRQSKIELNDWVGKVRPFIVTTEYEIDGVTIKKDKNGEVKRSFRAPSENDWGLRKKRTESLLEESGKTVGAFIYNHILSEPADKIRGNFIRTIERKFYKKELEAILREQSKHQKELKDIDTLIACIKELYPNNKPHQDSLIKKDMTYLLITDLIFYQRPLKSKKSLIADCPYEYYEYVIKETGENKRQSIKCIAKSNPYYQEFRLWQFIINLRLFDRNNDKEVTSEYLSSMEDYTRLFTYLNDRKDINQETLLKDFFKQKKVKRGMEKEFPIRWNYIEDKEKKYPCNETRHELLTALGKVGIDHSWLDDKELFYRLWHLLYSVESKEEAEGALRKLVDNDDFVNAFLKIKPFKKEYGAYSEKAIKKLLAVMRMGNLWNEVDICEQTRDRIQNIIKGDIDEKIKDRMGRTFSQLSDFQGLPEWLACYVVYGQHSEATDIQRWTKPENLMAYINGFKQHSLRNPIVEQCILETLRTVHDIWKEAGHIDEIHIELGRGMKSTADQRARMSKSIMQNENTNLRIKSLLMELKNAKEFENVRPYSPMQQEILRIYEEGALQELTKEDAQYNEISKISQMAQPSANELLKYRLWLEQKYCSPYTGKPISLSKLFTSAYQIEHIIPQSRYFDDSFTNKVICEAEVNQLKSNMLGYEFIKKHGGEIVRCTMIGDVKLLDAKEYYNFVTEHYTNNRRKKEKLLMEDIPQEFLNRQMNDSRYISKKVMAILSNIVREEDEQEAKSKFVIACSGGITDRLKQDWGLNDVWNSIVYPRFERLNKLTNTENFGRWENKKGKQVFQTSVPLELQKDFSKKRIDHRHHAMDALVIACASNNIINYLNNESAKSQEKREDLRKKLCDKNRIIRKPWETFTQDAHTALENVVVSFKNYIRVINKATNYYEKYDKNGKKEIAEQKGQDMWAIRKPMHKETVFGQVNLRRKITIKLKDALEKIPAICDKELRDYINILVAKQFNKKQILAHFKSINYRLNMKSVDKVDVWQFSNEKEPMVATRKSVDTSFDTKRIATITDTGIQKILLNYLKAKNNDPNIAFTPEGIAEMNKHITEYNNGKQHQPILKVRVSEPKGAKYQVGETGNKRSKFVEAQKGTNLYFAIYEDKEGNRSYNTIPLNEVIERLKQGLSPVPDANEKSIPLKFHLSPNDLVYVPKTDEENEIKMGQIYKFVDSSGTTANFVPHRVSNLIYNVDKKIAENFCNHEIIQNEYGIGSPQSKNQKSITGEMIKAVCWKLEVDRLGNIHKIIK

SEQ ID NO: 518 - protein, 1146 aa, Alicyclobacillus hesperidum
MAYRLGLDIGITSVGWAVVALEKDESGLKPVRIQDLGVRIFDKAEDSKTGASLALPRREARSARRRTRRRRHRLWRVKRLLEQHGILSMEQIEALYAQRTSSPDVYALRVAGLDRCLIAEEIARVLIHIAHRRGFQSNRKSEIKDSDAGKLLKAVQENENLMQSKGYRTVAEMLVSEATKTDAEGKLVHGKKHGYVSNVRNKAGEYRHTVSRQAIVDEVRKIFAAQRALGNDVMSEELEDSYLKILCSQRNFDDGPGGDSPYGHGSVSPDGVRQSIYERMVGSCTFETGEKRAPRSSYSFERFQLLTKVVNLRIYRQQEDGGRYPCELTQTERARVIDCAYEQTKITYGKLRKLLDMKDTESFAGLTYGLNRSRNKTEDTVFVEMKFYHEVRKALQRAGVFIQDLSIETLDQIGWILSVWKSDDNRRKKLSTLGLSDNVIEELLPLNGSKFGHLSLKAIRKILPFLEDGYSYDVACELAGYQFQGKTEYVKQRLLPPLGEGEVTNPVVRRALSQAIKVVNAVIRKHGSPESIHIELARELSKNLDERRKIEKAQKENQKNNEQIKDEIREILGSAHVTGRDIVKYKLFKQQQEFCMYSGEKLDVTRLFEPGYAEVDHIIPYGISFDDSYDNKVLVKTEQNRQKGNRTPLEYLRDKPEQKAKFIALVESIPLSQKKKNHLLMDKRAIDLEQEGFRERNLSDTRYITRALMNHIQAWLLFDETASTRSKRVVCVNGAVTAYMRARWGLTKDRDAGDKHHAADAVVVACIGDSLIQRVTKYDKFKRNALADRNRYVQQVSKSEGITQYVDKETGEVFTWESFDERKFLPNEPLEPWPFFRDELLARLSDDPSKNIRAIGLLTYSETEQIDPIFVSRMPTRKVTGAAHKETIRSPRIVKVDDNKGTEIQVVVSKVALTELKLTKDGEIKDYFRPEDDPRLYNTLRERLVQFGGDAKAAFKEPVYKISKDGSVRTPVRKVKIQEKLTLGVPVHGGRGIAENGGMVRIDVFAKGGKYYFVPIYVADVLKRELPNRLATAHKPYSEWRVVDDSYQFKFSLYPNDAVMIKPSREVDITYKDRKEPVGCRIMYFVSANIASASISLRTHDNSGELEGLGIQGLEVFEKYVVGPLGDTHPVYKERRMPFRVERKMN

SEQ ID NO: 519 - protein, 1084 aa, Phascolarctobacterium succinatutens
MKYAIGLDIGIASVGYAVLALDHEENPWGIIRLGSRIFDVAENPKDGASLALPRREARSVRRRLRRHHHRLERIKNLLINTEFITKDELLHLYDGNLSDVYELRVKALDYSVTNAELTRILLHLAQRRGFKSNRKSDANDKEAGQLLEAVSANAKRMQENHYRTVGEMFYKDDLFSKYKRNKGGTYLTTVHRDMIAAEARTILEKQFALGNNICTQDFIDKYLSILLSQRQFDEGPGEPSPYAGNQIANMIGKCTFEPNEYRAAKASYSFERFNLLQKVNHLRLLLEGKSIALDNEQRKKIIALAHDKADLRYSHIRKALGLDEKVLFNTITYNDDVSVIEKKTKFNFLQAYHQIKKVLAEDMQKLTTEQLDNIGQILSTYKSDNKRTEELSALGLEKKIIDALLGINGLSKFAHLSLKALRKINPYLEEGKIYNEACTAAGYDFKAHANTQKTELLPAYKEEMDDITSPVARRAIAQSIKVINAIIREQKGSPLYINIELAREMAKGFDERTQIDKANKENQAKNERIMERIRTEFHKANPTGMDLIKLKLWEEQDGRSPYSQKAISINRLFEPGYVDIDHIVPYSISFDDSFKNKVLVFSDENRDKGNRLPIAYLQSKFGAKAAENFMIWVQSNIKDYKKRQKLLKREITEEDINKFKERNLQDTKTISRFLYNYINDYLLFAPSDTGKKKRVTAVNGTITAYLRKRWGINKIRANGDKHHAVDAVVIACTTDKMIKDLSSFSRYHELEYTHTDTESFLVNSLTGEILKRFPYPWEDFRPELMARLSDNPADALRKLNLIFYHGIDLSTIKPIFVSRMPRHKVTGAAHKATIKSARCLDNGIVICKTSLQNLKLDKEGEIANYYAPESDTILYNALKERLRSYDNKPAKAFAEPFYKPKADGTPGPLVKKVKVYEKSTLNVAVQQNTAVADNDSMVRVDVFHVKGNGYYLVPIYIADTLKKELPNKAIVAYKPYADWPVMDDSNFIFSLYPNDLIKFEHKNSVKFAKVNKESTLNDFYSTKSEIVYFKGCNINTGAITIINHENTYVVSSLGVKTLPSLEKYQADVLGNYTKVKKEVRKPFR

SEQ ID NO: 520 - protein, 1361 aa, Anaerococcus tetradius
MGNYYLGLDIGTNSVGWAVTDENYNIERFKKKNMWGIRLFDEAKTAESRRIHRQARRMRQRKIQRLNLLMELFDVEISKVDESFFIRKKESDLHYEDKSQDSRYALFNDKEFNDKDYHNKYPTIFHLIMDLIENDEKKDIRLLYLACHYLIKNRGHFIFEGQKFDVNSSLNNNINKLKSHLDQFYNICLDFDNDKLIEILVNQNLNISEKSKKIKELLRKTNLEVGIANLIAGGSIKLSNMFDDDELKNLDYNSLSFKNSNFDEGRELFEEVLEDRFELVEILKDIHDASVLETMLSSASISPDGGKYISSSMINSYNKHKRDLKLLKKIIKKYKKSEYDNIFRDENIKNNYLSYTRTGINKNKKVQAEDNTDSDGFYKYIVKILKDIKENDSDEDIKYILSEIDKKNFVPKQRTKENSVIPYQLREIELRKIIDNQSKYHKFLNEVDEKGISVKEKIISLLTFRIPYYIGPLNPSYNEEKNFTTSWVKRLAKGKVTPWNFEDMVDIDASREAFIENKLNKCSFLLDETVLPKDSLLYQEYMVLNELNNLKINGQSINTDLKKSIYEELFKKYKKVTRKRLISYIKEKENMSGDIVITGIDGDFKQGLKSYIAFKDIIGEKIDDDIYRKEVEKIIRDISLYGDDKSFIQKKIKNENKLDLSDDQISKIAKLKFKDWGRFSKKLLVGIKASDKNTGEIDNIIGFMRNYNYNIMQLMANVFTFKDEIEKLNSKYYTDEKINIDYLDDLYLSSPAKRMLWQSFQIVDEIKNIKNSDPKKIFIEMARSKEDKPTRKMSRKSRLEKLYTDSKKQFIKLFGPDEYDKLNNEIKNKSESDFRWDNLYLYYTQFGRCMYSLDPIDLEELSNKNLYDQDHIYPKSKIYDDSIENRVLVKKQLNLDKSNEYPIPDRVLNKDKNKLLAFWKMLNEKELIGDKKYARLIRKSPFTDEELGDFIARQLVETRQATKETANMLKRLCPDSKIVYVKAKNVSDFRRKFDILKCRSINDLHHAHDAYLNIVVGNVFDTKFTSNPLNFIKNNSKNRSYNLEKIYDYDVIRNEKIAWLAERKEENQDGSIATVLKNLSKNDIRVTRRTYIKCEDLFDENIVRKGNGKFPIKENNNKSDTNKYGGYSGIKNAYFVLLEDEKHNRILEAIPSFIYKKEKNGEKGSVINYLQNILGIKSAKILRDKIKIGSLLKIDKFPYNLAGKSGNGILISGGVQLILDKNTSKYIKKIENYKYKLDENKDYQINIFDKLSKEENIKLFDLFVDKFENSIYKNRVNIKLKEIKLARPKFEHLSIEEQIKTLTQMLILFGRENNAVNLEYIGLPKNTGKTKINKKINNKDIKIINQSITGLYETEEDLANI

SEQ ID NO: 521 - protein, 1052 aa, Blastopirellula marina
MPSKSPSVSPLLLGLDIGPSSLGWALFSESGDQPSLVDCGVRIFPEGVERDQQGGEKSKSQSRRVARGIRRQVRRRAQRLRHLKHALITTGLFPADVVDQQEVLASNPYELRSRALSEKLEPYEIGRILLHLAKRRGFLSNRTTDRSGGNELKGILAEMTQLQGEIAAHGCQTLGQYLHQLGDDGETFAQRLRGRHTLRAMYEDEFEKIWERQASYYPALLTEELRGGEEGKQSYPLVPTARRKSESLLKRFGLHGLLFFQRKMYWPKSVIGRCDLEPKEKRCPKADRLAQRFRILQEVNNLRLISPADRKEYTFAEFVGAGADKKLVDYLCEAKERTFPQIRKKFKLPETISFNYERGERSKLQGHETDAHFNGKKGLGKRRWSEIAEDVKDHIIQIVLEEDREDVALRKLTQDCSLTVEEAHKAMALHLPAGYSQYSRVAISRLLPHLELGKLLMGNDASDSAMHAAGYLRPDEREVRQYDLLPEPPDIPNPLVRQALYEVRKVINAIIREYGALGTIRVELAREAKKSAEQRTQIRIANAKRERENAAIAKTLQEMSPAIRPTRRNIQRYLLWKDQGGVCIYTGKVISQAQLFDSGEVDVDHILPRWRSLDDSMANKVIAHRSANNEKGDRTPWEWLGHDKPRFDELLLRAQRLPYGKRQRFIQKEVELTNFVERQLRDTTYVSRLVVQYLKGLGVPITTVKGPMTAELRHHWGLNALLNEDGSQKKNRSDHRHHAIDAIVIGLTDAKRLHALANARGKDLQPPWSEFRSDVATALGRMAVSHRVRRRIQGALHEETIYGPTQKAAQPTSTDQRPWAKDWIEDSQIVVRRKSVSDLTNTKHLAKIRDVTIRKILEDHLRRQKVDPTKPGVIPKDAFAGSNAPQMPSGVPIKKVRLVERGETWRKIGSGEASKFIKPGSNHHISYFAISRKGRESWKAHVTIMLDAACIAKESINNGKIVNRSIGDQGRFLMSLSIGEMFEITNNGGEILLCVVRKIDQSGRIYYKIHDDARESMDLKKDNLYMSPSKMQQFDARKVTVTPLGKIRNAND

SEQ ID NO: 522 - protein, 1498 aa, Odoribacter laneus
METTLGIDLGTNSIGLALVDQEEHQILYSGVRIFPEGINKDTIGLGEKEESRNATRRAKRQMRRQYFRKKLRKAKLLELLIAYDMCPLKPEDVRRWKNWDKQQKSTVRQFPDTPAFREWLKQNPYELRKQAVTEDVTRPELGRILYQMIQRRGFLSSRKGKEEGKIFTGKDRMVGIDETRKNLQKQTLGAYLYDIAPKNGEKYRFRTERVRARYTLRDMYIREFEIIWQRQAGHLGLAHEQATRKKNIFLEGSATNVRNSKLITHLQAKYGRGHVLIEDTRITVTFQLPLKEVLGGKIEIEEEQLKFKSNESVLFWQRPLRSQKSLLSKCVFEGRNFYDPVHQKWIIAGPTPAPLSHPEFEEFRAYQFINNIIYGKNEHLTAIQREAVFELMCTESKDFNFEKIPKHLKLFEKFNFDDTTKVPACTTISQLRKLFPHPVWEEKREEIWHCFYFYDDNTLLFEKLQKDYALQTNDLEKIKKIRLSESYGNVSLKAIRRINPYLKKGYAYSTAVLLGGIRNSFGKRFEYFKEYEPEIEKAVCRILKEKNAEGEVIRKIKDYLVHNRFGFAKNDRAFQKLYHHSQAITTQAQKERLPETGNLRNPIVQQGLNELRRTVNKLLATCREKYGPSFKFDHIHVEMGRELRSSKTEREKQSRQIRENEKKNEAAKVKLAEYGLKAYRDNIQKYLLYKEIEEKGGTVCCPYTGKTLNISHTLGSDNSVQIEHIIPYSISLDDSLANKTLCDATFNREKGELTPYDFYQKDPSPEKWGASSWEEIEDRAFRLLPYAKAQRFIRRKPQESNEFISRQLNDTRYISKKAVEYLSAICSDVKAFPGQLTAELRHLWGLNNILQSAPDITFPLPVSATENHREYYVITNEQNEVIRLFPKQGETPRTEKGELLLTGEVERKVFRCKGMQEFQTDVSDGKYWRRIKLSSSVTWSPLFAPKPISADGQIVLKGRIEKGVFVCNQLKQKLKTGLPDGSYWISLPVISQTFKEGESVNNSKLTSQQVQLFGRVREGIFRCHNYQCPASGADGNFWCTLDTDTAQPAFTPIKNAPPGVGGGQIILTGDVDDKGIFHADDDLHYELPASLPKGKYYGIFTVESCDPTLIPIELSAPKTSKGENLIEGNIWVDEHTGEVRFDPKKNREDQRHHAIDAIVIALSSQSLFQRLSTYNARRENKKRGLDSTEHFPSPWPGFAQDVRQSVVPLLVSYKQNPKTLCKISKTLYKDGKKIHSCGNAVRGQLHKETVYGQRTAPGATEKSYHIRKDIRELKTSKHIGKVVDITIRQMLLKHLQENYHIDITQEFNIPSNAFFKEGVYRIFLPNKHGEPVPIKKIRMKEELGNAERLKDNINQYVNPRNNHHVMIYQDADGNLKEEIVSFWSVIERQNQGQPIYQLPREGRNIVSILQINDTFLIGLKEEEPEVYRNDLSTLSKHLYRVQKLSGMYYTFRHHLASTLNNEREEFRIQSLEAWKRANPVKVQIDEIGRITFLNGPLC

SEQ ID NO: 523 - protein, 1528 aa, Lunatimonas lonarensis
MKKILGLDLGTNSIGWALVEQDFKNKQGNIMGMGSRVIPMSQEILGEFARGNTKSETAERTRLRSVRRLRERHLLRRERLHRVLHILGFLPKHYVNQIDFQERLGKFFEESEPKLAYDTGDFLFKPSFLEMLEEFKIHQPSFVEGDKKVPYDWTIYFLRKKALTERIEKEELAWVILSFNQKRGYYQLRGEDEEEKPNKLEEFYSLKIVDIKVDESPNKKGDTWYSLTLENGWIYRRSSKVPLDDWLGKTRDFIVTTDIDEEGNPKLDKEGNPKRSFRAPSEDDWGLRKKKTEKEILDSSKTVGHFIFENLLADPTQKIKGRLVRTIERKFYKDELKQILVSQNRFHPELSDADMMADCVRELYKHNHSHQNFLASKDIKHLLVDDIIFYQRPLRSQKSTIGNCPLEFKTFKKDGIEIKVPYKVAPKSHPLFQEFRLLQWVSSLRIIRKSDDSDVTREFLGTQDKTKQLLDYLMTQSEMDCNKLMTFLLTQEGYKRKDLKSEVGKFRWNYVFDSETGESKTYPGNSTRAEFLKRLGKVEGFDFSKYTEEFEESLWHLVYSVTDKVEFEKALRKFSRKNGIEINSFVENLKKFPPYKSEYASYSLKAIKKLLALMRFGENWKEDSIDSISKHRIEKILTGEYDPEIKDKVREISRAFDEVEDFQGLPVWFANYVVYGRHSEASELIKWTSSDEMADFIKEFKQHSLRNPIVEQVVLETLRVVKDIWDKYGHGQKDFFDEIHVELGRELKNPAEQRARLTTQISANENTNLRIKSLLVELLHDPGVENVRPYSPMQQEILKIYEEGVLKSSFEVPDDILKISKTAQPSSSDLKRYKLWLEQKYRSPYTGKIIPLNKLFTPAYEVEHVIPQSRYFDDSFSNKVICEAAVNKLKDNRLGMEFIKCFHGQRVSLGFGEEVEIFSESAYKAFIQDNFPKNPAKKRKLLMDELPEQMVERQMNDTRYISKFVTSILSNIVRSEENDTGFNSKNIIPGNGKITTALKQDWGLNDVWNELILPRFERMNQLTGTTVFTAWNENHQKFLPTVPLEYAKGFQKKRIDHRHHAMDALVIACATRDHVNYLNNEHALGKNYKGKEEKQSRRFDLRQKLCLKKKNGHSQEQYEWIFSKPWDSFTQDAKKNLERIIVSFKQNLRVINKTSNKYLSYKDEEGNLRLDSQGKPVKALTRQIKGDAWAIRKSIHKDTVSGLVKLRRVKMVNLSVALDNPENILNKKLKKKIAELVKLNYDNKLLLKYFRDRDYMFDGREVSKLDVYYFEEGLAASRVSLDTSFSDKKIQSITDTGIRKILLAHLANYHGRLDEKGKVIPPETLAFTPEGIEELNKNIKGLNGGKFHQPIFKVRTYEPKGNKFQVGFKGNKNSKYVEAAKGTNLFFAIYLNDEGKRSYETIPFNVVMERLKQGEGPVPQTNEKGGKLLFHLSPNELVYVPETDENYTNVDFKNLSKEQVEKIYKMVSSTGSECHFVRADISSLIKGYDAKTKVGELGSLNKQEVTNNGMTRIKEKCWKIKIDRLGSI

SEQ ID NO: 524 - protein, 1270 aa, Mycoplasma gallisepticum
MNNSIKSKPEVTIGLDLGVGSVGWAIVDNETNIIHHLGSRLFSQAKTAEDRRSFRGVRRLIRRRKYKLKRFVNLIWKYNSYFGFKNKEDILNNYQEQQKLHNTVLNLKLEALNAKIDPKALSWILHDYLKNRGHFYEDNRDFNVYPTEELANYFDEFGYYKGIIDSKNDDDDKLEEGLTKYKFSNQHWLEEVKKVLSNQTGLPEKFKEEYESLFSYVRNYSEGPGSINSVSPYGIYHLDEKEGKVVQKYNNIWDKTIGKCSIFPDEYRAPKNSPIAMIFNEINELSTIRSYSIYLTGWFINQEFKKAYLNKLLDLLIKTNSEKPIDARQFKKLREETIAESIGKETLKDVESEEKLEKDDHKWKLKGLKLNTNGKIQYNDLSSLAKFVHKLKQHLKLDFLLEDQYTPLDKINFLQSLYVYLGKHLRYSNRVDSANLKEFSDSSRLFERVLQEQKDGLFKLFEQTDKDDEKILTQTHSLSTKAMLLAITRMTNLDNDEDNQKNNDKGWNFEAIKNFDQKFIDITKTNNNLSLKQDKRYLDDQFINDAILSPGVKRILREATKVFNAILKQFSEEYDVTKVVIELARELSEEKELENTKNYKKLIKKNGDKISEGLKALGIAEDKIEEILKSPTKSYKVLLWLQQDHIDPYSQKEIAFDDILTKTEKTEIDHIIPYSISFDDSSSNKLLVLAESNQAKSNQTPYEFINSGKAEITWEVYEAYCHKFKNGDSSLLDSTQRSKKFAKMMKTDTSSKYDIGFLARNLNDTRYATIVFRDALKDYANNHLVEDKPMFKVVCINGGVTSFLRKNFDPKSWYAKKDRDKNIHHAVDASIISIFSNETKTLFNQLTKFADYKLFKNTDGSWKKIDPKTGVVSEVTDENWKQIRVRNQVSEIAKVIDKYIQDSNIERKARYSRKIENKTNISLFNDTVYSAKKVGYEDQIKRKNLKTLDIHESAEENKNSKVKKQFVYRKLVNVSLLNNDKLADLFAEKEDILMYRANPWVINLAEQIFNEYTENKKIKSQNVFEKYMLDLTKEFPEKFSEAFVKSMIRNKTAIIYNVEKDVVHRIKRLKILSSELKENKWSNVIIRSKNESGTKLSYQDTINSIALMIMRSIDPTAKKQYIRVPLNTLNLHLGDQDFDLHNIDAYLKKPKFVKYLKANEIGDEYKPWRVLTSGTLLIHKKDKKLMYISSFQNLNDLIEIKNLIETEYKENVDSDPKKKKKASQILRSLSVILNDYILLDAKYNFDILGLSKNKIDEILNSKLDLDKIAK

SEQ ID NO: 525 - protein, 1340 aa, Dorea longicatena
MEQEYYLGLDMGTGSVGWAVTDSEYHVLRKHGKALWGVRLFESASTAEERRMFRTSRRRLDRRNWRIEILQEIFAEEISKKDPGFFLRMKESKYYPEDKRDINGNCPELPYALFVDDDFTDKDYHKKFPTIYHLRKMLMNTEETPDIRLVYLAIHHMMKHRGHFLLSGDINEIKEFGTTFSKLLENIKNEELDWNLELGKEEYAVVESILKDNMLNRSTKKTRLIKALKAKSICEKAVLNLLAGGTVKLSDIFGLEELNETERPKISFADNGYDDYIGEVENELGEQFYIIETAKAVYDWAVLVEILGKYTSISEAKVATYEKHKSDLQFLKKIVRKYLTKEEYKDIFVSTSDKLKNYSAYIGMTKINGKKVDLQSKRCSKEEFYDFIKKNVLKKLEGQPEYEYLKEELERETFLPKQVNRDNGVIPYQIHLYELKKILGNLRDKIDLIKENEDKLVQLFEFRIPYYVGPLNKIDDGKEGKFTWAVRKSNEKIYPWNFENVVDIEASAEKFIRRMTNKCTYLMGEDVLPKDSLLYSKYMVLNELNNVKLDGEKLSVELKQRLYTDVFCKYRKVTVKKIKNYLKCEGIISGNVEITGIDGDFKASLTAYHDFKEILTGTELAKKDKENIITNIVLFGDDKKLLKKRLNRLYPQITPNQLKKICALSYTGWGRFSKKFLEEITAPDPETGEVWNIITALWESNNNLMQLLSNEYRFMEEVETYNMGKQTKTLSYETVENMYVSPSVKRQIWQTLKIVKELEKVMKESPKRVFIEMAREKQESKRTESRKKQLIDLYKACKNEEKDWVKELGDQEEQKLRSDKLYLYYTQKGRCMYSGEVIELKDLWDNTKYDIDHIYPQSKTMDDSLNNRVLVKKKYNATKSDKYPLNENIRHERKGFWKSLLDGGFISKEKYERLIRNTELSPEELAGFIERQIVETRQSTKAVAEILKQVFPESEIVYVKAGTVSRFRKDFELLKVREVNDLHHAKDAYLNIVVGNSYYVKFTKNASWFIKENPGRTYNLKKMFTSGWNIERNGEVAWEVGKKGTIVTVKQIMNKNNILVTRQVHEAKGGLFDQQIMKKGKGQIAIKETDERLASIEKYGGYNKAAGAYFMLVESKDKKGKTIRTIEFIPLYLKNKIESDESIALNFLEKGRGLKEPKILLKKIKIDTLFDVDGFKMWLSGRTGDRLLFKCANQLILDEKIIVTMKKIVKFIQRRQENRELKLSDKDGIDNEVLMEIYNTFVDKLENTVYRIRLSEQAKTLIDKQKEFERLSLEDKSSTLFEILHIFQCQSSAANLKMIGGPGKAGILVMNNNISKCNKISIINQSPTGIFENEIDLLKI

SEQ ID NO: 526 - protein, 1054 aa, Staphylococcus pasteuri; identical to SEQ ID NO: 169

SEQ ID NO: 527 - protein, 1139 aa, Streptococcus sp.
MSDLVLGLDIGIGSVGVGILNKVTGEIIHKNSRIFPAAQAENNLERRTNRQGRRLTRRKKHRRVRLNHLFEESGLITDFTKVSINLNPYQLRVKGLTAELSNEELFIALKNMVKHRGISYLDDASDDGNSSVGDYAQIVKENSKQLETKTPGQIQLERYQKYGQLRGDFTVEEDGRKHRLINVFPTSAYHAEALRILQTQQEFNPQITDEFINSYLEILTGKRKYYHGPGNEKSRTDYGKYTTKKDAQGQYITLNNIFGILIGKCTFYPEEYRAAKASYTAQEFNLLNDLNNLTVPTETKKLSEEQKYQIITYVKNEKAMGPAKLFKYIAKLLSCDVADIKGYRIDKSDKAEIHTFEAYRKMKTLETLDVKKMAREELDKLAYVLTLNTEREGIQEALDHEFADGTFSQEQVDELVQFRKANSSIFGKGWHSFSVKLMMELIPELYATSEEQMTILTRLGKQKTTSSSNKTKYIDEKQLTEEIYNPVVAKSVRQAIKIVNAAIKKYGDFDNIVIEMARETNEDDEKKAIQKIQKANKAEKDAAMRKAANQYNGKAELPHSVFHGHKQLATKIRLWHQQGERCLYTGKTISIHDLINNPNQFEIDHILPLSITFDDSLANKVLVYATANQEKGQRTPYQALDSMDDAWSFRELKAFVRESKALSNKKKEYLLTEEDISKFDVRKKFIERNLVDTRYASRVVLNALQEHFRTHKIDTKVSVVRGQFTSQLRRHWGIEKTRDTYHHHAVDALIIAASSQLNLWKKQKNTLVSYSEDQLLDIETGELISDDEYKESVFKAPYQHFVDTLKSKEFEDSILFSYQVDSKFNRKISDATIYATRKAKLDKEKKEYTYTLGKIKDIYALGTKTPSKTGFYKFLDLYKKDKSQFLMYQKDRRTWDEVIEKILEQYRPFKEKDKNGKEVDFNPFEKYRIENGPIRKYSRKGNGPEIKSLKYYDNLLGRFVDITPSESKNPVALLSLNPWRTDVYYNTETRKYEFLGLKYADLCFEKGGSYGISKVKYNKIREKEGIGKNSEFKFTLYKNDLILIKDTETNRQQIFRFWSRTGKDNPKSFEKHKLELKPYEKTRFEKGEELKVLGKVPPSSNRLQKNMQIENLSIYKVRTDVLGNQHIIKNEGDKPKLDF

SEQ ID NO: 528 - protein, 1036 aa, Rugosibacter aromaticivorans
MLHKMHYRLALDLGSTSLGWAMIRLDADNQPCAVIKAGVRIFSNGRNPKDGSSLAVTRREARAMRRRRDRLLKRKARMMRTLIEYGFFPAEAAQRKALETINPFALRAKGLDEALTPAEFGRALFHINQRRGFKSNRKTDKKDNDSGALKTAIGKVRATIEAEGCRTVGEWLHKRDVAGLTVRARYHQDKVIKEDGKTKIDKYYDLYIDRAMIEQEFDELWKKQAELNPALFTEAARADLKDVLLHQRPLKPVKSGRCTFMPDEERAPLALPSTQRFRMYQEVNNLRILRDGLKEEPLTLKQRDDLIAALEKNSKHSFTQIKTLLGVGGAVQFNFEDLKRQELKGNTTSAILSNDKHFGKAWFTFDEAKQDAIVLQLVKEENEAKLVRWLQDETGIDEKRAEAIANVGLPEGYGSLCAKALARILPELRRDVMTYDKAVQAAGFEHHSRLGSNTEIPGLTFKIESIDQDSGEVKQFHIHKVLPYYGEYLQRHVGFGSGEPEDPAEKRYGKIANPTVHIGLNQIRLVVNALLKRYGHPSEVIVELARDLKQSKDQRDEESKRQAENQKRNKRLRDAIAGTLKISEERVRRDDIQKMILWEELSFDPADRRCPYSGAQISATMLLSDEVEVEHILPFSQTLDDSLNNKTVALRQANRIKGNRTPWDAFGAQAVAGFDYESILVRAEGMPKAKRYRFAENGYQRWLKDDASFLARALNDTRHMSKVAFEYLKLICPNTRVIPGRMTAMLRAKFGLNDVLGLNGEKNRNDHRHHAVDACVIAVTDQGLLQRFAKASASAREQQLNRLVENMPLPWGSYREHVQRAINAIWISHKPDHSHEGAMHNDTAYGLRGDGKVSFHKMVEGVRTHSEDNLKVIEISNAKATDRHGLLPNGEPRPYKGYKGDSNYCIEIVRNEKGKWEGEVISTFEAYQLVREHGIARLRHSTLSVSGKLLVMRLMIDDVVRLIIDEQTRTMRIATLSGNGQIFMADTSEANVDARNRSKEETFAYVSKMAGSLQKANARRINISPIGELRDPGFKE

SEQ ID NO: 529 - protein, 1190 aa, Gardnerella vaginalis
MILHMEGNISYAIGIDVGLNSVGLAAIRLDNNGEPIRILKAMSVIHDAGIDPNGAKESDTRKAISGVARRVRRLYRQRRRRLQKLDFLLHSLGFPVVENKDLDFSDSFTPWIFRAKLADEYIADEKQRKQMLSVAIRHIARHRGWRNPYQSIKSMTQETEYSEFYNELLKNIEKFAPGVSCEGSTPAQLVRDYLLSQQGKASRRLRITTDDRRKNHPNSLDPVLPRKLMQSDNMLEILNIFNVQHIDNKYVREQIINAVFYAKSPRGSAENRVGKDAITGKGKRALKASLAFQKYRIISTISNLRIRENSKERCLTIEEKQSVYKLLTTSTDEYSKEKSAEAPLYTWIDVADCLGIERYKLRGVGSQIEDGESVGNRPPMLNSELAILYANAKSLKQSLITWWLAANRTQEDKEAFIEILSNTVDIEAIHDNPEYQDKYGSVIAFIDSMDETEIAALENISLPNGRAAYSLETLDKLNKQMLETDDDLFEARKKLFNLPNNWRPSEAPIAEPTGNPSVDRVLKIVHRFLISAKNRWGNPERINIEHVRSGFQSKKMANSYKKLLDKRTEGKENLKAMMRNSLHLGTSDSISDADIRRYEAVQRQNGQCLYCGSEITYHTCELDHIVPRKGPGSTNTRENLVATCSSCNAQKCNTPFATWCEESTYCKNHDISVDSAINRVRAFIFPPNSYDKRGASQFKKEVIARLKQKVGDEAFDNRSIESVAWMANELHRRIDWYYNSQNYQTNNGISDITNKAQTNVGVYAGSLTAIARRMSGIDGKLEFFDGRRKTRFDRRHHAVDASVIAMMTPGIAQILAIKCNLRETQLLQGNKVVPGGIDWKEYPTANDQGYQQYANWSVRMNALLELLNEEMRADRIAVVNSIRLRYSNSSVHKDDVHALLKLHVGDEIDSETIRRASTPALYCALTRNPDYDVNNGLPENTDRTILLHDKKLNADDSITFFKSKAAQLFVREGSVEIGNSIHHLRIYEYFEKLKSGKVKKSYGMIRVFQDDLHRYIHEDLFSCDLPEQSISMRYADTKVAHAVQTGNANYLGYLVPGDEIIVDFSHVKLSGYIGEFVEFLNKIGANCAAYKHWVVAGTDDKTTLILKPSMISSEGIDKLYSNCERNNFDYASYEKSIDKILVDKGWRVSVNVLDQYKAATIRRNALGEPRWASRSHLPISWSWDTGENRE

SEQ ID NO: 530 - protein, 1038 aa, Helicobacter muridarum
MKKLAFDIGIASIGWAFVEDDELRDCGVRIFTKAENPKNGKSLALPRREARAVRRRLARRKTRLNSLKRLLCKELGFNLNDYLSNDGVLPKAYETNKDTKSPYELRTLALSQKLDSKDFARVVLHIAKHRGYGNKHAKIGSDKDSGKVLSAIKANKQAMEDKEYKSVGEYLYNEFYQKQRLESEKKVSNHASEFKNVRNKGKSYEHCVAQEQLKAELELIFKRQREFGVSLSKEFEDKVIDIAFFQLPLKDFSDKVGECVFCEGQKRAPKDSLSAMEFVALTRIINTLRNLEKRISNKTYSKEKVQEILQIVLDKGEISYKKLREILSLPDYVRFSDSKLDYTKELKEVEKAKFIELKNLKAFKKALGRSFDEFSRDSLDKIAEAIALNKSRENLKKELEKNFAQILRQEQKEALSDLSFAKHIDLSLKALNEILPFMRGESSNECLRYDEAVERAGLKEIAKNKEQGNFLLALKEYEPYLANPVVARALSEYRKVLNALLRKYGQVHKIHLEFTREVNLSHEERKKVEKEQQANFTKNQEAEKLCKEIGLHISKDSILKAKLFIEQGEFCAYSCYKITSDHLKDPNMLQIDHIYPYSRSFDDSYMNKVLVFNKENQNKGNRTPFEAFGSDKDKWEKILSLADRLPKAKRKRIYNKDFKDKEAGFILRNIVDTGYIARLASQWTKHCLKFLPLSENEVTIAGEKGSKVHVEIISGKLTSMLRHYWGLGNKDRSNHLHHAVDAIIIAYASAKTIKAFADFRANQDKNTAEFYAEQISELEYVEKRAFFNPCKNFRKKVLEKLNSIFVSKPPRKRARGALHEETFYSFDDKNLLKSYGGEKGIQKAIELGKIRQIGTKIVSNGTMVRVDIFKDKKGKFYGVPIYTMDFALGILPNKAVVGGKDKEGVIKDWKEMDSNYEFCFSIFKDDLILVQKNEMEEAELCYYKRFKTSGASIEVVKHDNRVDNITENQEKIFKLKFDNGKKILDESLIAIQNLKIFEKYQVSPLGEVQKAEFIPRQSISLKSTPNKNKLNKVNEVKS

SEQ ID NO: 531 - protein, 987 aa, Campylobacter jejuni
MARILAFDIGISSIGWAFSENDELKDCGVRIFTKAENPKTGESLALPRRLARSARKRLARRKARLNRLKHLIANEFKLNYEDYQSFDESLAKAYKGSLISPYELRFRALNELLSKQDFARVILHIAKRRGYDDIKNSDDKEKGAILKAIKQNEEKLANYQSVGEYLYKEYFQKFKENSKEFTNVRNKKESYERCIAQSFLKDELKLIFKKQREFGFSFSKKFEEEVLSVAFYKRALKDFSHLVGNCSFFTDEKRAPKNSPLAFMFVALTRIINLLNNLKNTEGILYTKDDLNALLNEVLKNGTLTYKQTKKLLGLSDDYEFKGEKGTYFIEFKKYKEFIKALGDHSLSQDDLNEIAKDITLIKDEIKLKKALAKYDLNQNQIDSLSKLEFKDHLNISFKALKLITPLMLEGKKYDEACNELNLKVAINEDKKDFLPAFNETYYKDEVTNPVVLRAIKEYRKVLNALLKKYGKVHKINIELAREVGKNYSQRAKIEKEQNENYKAKKDAELECEKLGLKINSKNILKLRLFKEQKEFCAYSGEKIKISDLQDEKMLEIDHIYPYSRSFDDSYMNKVLVFTKQNQEKLNQTPFEAFGNDSAKWQKIEVLAKNLPTKKQKRILDKNYKDKEQKDFKDRNLNDTRYIARLVLNYTKDYLDFLPLSDDENTKLNDTQKGSKVHVEAKSGMLTSALRHTWGFSAKDRNNHLHHAIDAVIIAYANNSIVKAFSDFKKEQESNSAELYAKKISELDYKNKRKFFEPFSGFRQKVLDKIDEIFVSKPERKKPSGALHEETFRKEEEFYQSYGGKEGVLKALELGKIRKVNGKIVKNGDMFRVDIFKHKKTNKFYAVPIYTMDFALKVLPNKAVARSKKGEIKDWILMDENYEFCFSLYKDSLILIQTKDMQEPELVYFNAFTSSTVSLIVSKHDNKFETLSKNQKILFKNANEKEVIAKSIGIQNLKVFEKYIVSALGEVTKAEFRQREDFKNELR

SEQ ID NO: 532 - protein, 1048 aa, Acetobacter aceti
MANIAENLVFGIDLGIGSCGWAVLNQKAKDENIVALGSWCFDVPETDKERIPTNQIRRANRLLRRVIRRRRNRMAEIRRLFASKGMLDTADPDALAKISADPWEMRAKGLDYQLTPQEFAVALGHIAKRRGFKSAAKRVSTNAPSEDSKMLAALEKTKEQSAQYRTIGEMFARDPAYADRRRNRDGCFDRTMSREDLFKETQILFESQRRLGNFSATSETEQAFIDIAFRQKPMQDSERLVETCLFEPDEKRASRFAPSFERFRLLCRLVNLRVTDGLEDRPLTPEELRLACEDAGKTRKLSVKKVRSLIGLRDDQRFTTIPPDQEQHDIAARTGDALTGTATFRAILGESFWRQLLPHPEQLDRAAWIISFHELTDTIISKLATIGLPSEVMELIRKALEDGKFSKFKGAASLSDKAARKLIPFLQEGLTYDKACQKAGYNHAASKFTHYDSIDTKAKFNSLMDDVRDSITNPVARKAISEGMKQVWAMRNQWGLPGAICIELARDVGNSAEKRREIESGIKKNTAQRERERQEAKEHLNQSDISSETLLRYRLWKEQGGRCCYTDQPITPSQLIASDNSVQVDHILPWSRFGDDSYLNKALCTAKANQEKKNRTPWEWIHNQKGVEAWNHFTAAVESRKETRGLKKRNFLLKSSKETEERFRSRNLNDTRYAARVMAEAVRLLYPSGNRAEKGGVKRVFTRPGALTAALRHAWGVESLKKINGKRLNDDRHHALDAAVVAAVSEKEIQKLTKSFQICEQKGLARPMRDVPMPWEGFRHQLETAYADIRVARPERRRARGKGHDATIRQLREEKDGPVVYERRAISDLKLTDLERIKDPERNSAIISSLRTWIEKGKPADYPPQSPKGDEIRKIRVMSRNKPAVSVRGGTADRGEMTRVDVFTKMGKKGKPEWFLVPIYRHQVIDRIQWPQPPNQAAANGKSEKNWPTMGLEHEFRFSLYPRSYVQIVKRDGEIIEGYFAGLDRTVAAFSLLSSSDPTSIQRGIGAKTLESIRKYNVNRFGDISMVEQETRTWHGDVCISPDQPDSA

SEQ ID NO: 533 - protein, 1150 aa, Actinomyces georgiae
MLLPQVGNSRAPLVRCPVSSYFRETLPKGRAEWHNAHMSASSQNVERIRYKVGIDVGLRSIGFCAVQVDADDRPVKLLNTVVHVHDAGVSPADAKKADTRKLVSGVARRTRRLYRTRKRRLVDLDRQLDGLGWPLVDPARFADPREPWFAREKLVSGRVDDADERKELLSVALRHIAHHRGWRNPYSTVESLQADAPPSEFLQGLNQRVSEKLGTELDPGLTQGQLVAKLLHRFPNAKIRGPEGILRGKLHQSDNAGELRLICRTQGLDCHITEELVRLVFQAKSPKANKEMRKRIGRDQLPGQGAHIRAEKAHPVFQRFRIVAVLANLRIREAHVDRRLTAEEMRTLTDFLLGLAGSEQPTWEELADNLNIERHQLRGTAKASVDGAPALRFPPIDATTDRIYASKLKWLAEWWRQADEERRGYMVDALSNSGGSEDEPYLDDEIAEMLEQASEEDQAKLDSLHLPGGRASYCLDTLRRLTDAMLGGGLDLFEARKAVFHVDDDWAPPTDPIGAPVGNPPVDRVLKHVARWLEAATGRWGAPQTINIEHVREGLGSEKAARELTRMNDRRRRNNQKLVEEMGEKLGMSGRIRRSDRMRYEAIRRQNCECLYCGQPITYQTMEMDHIVPRAGAASTNSRSNLAAVCRRCNHQKGKLPFAVWAESQDSPAEVRLQDAVQRVRHWLRDAGMGQKELQALRVQVIARLKSKRPDEEFDGRSMESIAWMANELRARVEAQYRGSGTTVRVYRGALTAEARKASGFEGRVNLIGGRGKDRFDRRHHAMDALVIALMNQSVAQTLALRLNMRDSQWLTQSEQTWRQFHGAPGEAARKWEAWDRDMRDASDLFNLALDGGRIPITENVRLRVGNGRVHEDGVIRFKPEYEVKGKTIKGGEARLLGDSLPSEQIDRAETPALWTALTRLPEYDRKSGLPENPDRVIRVNGAVVQATDRIRFFGTPASVAVRGGYAKLGESIHHARIYRINGKTPKYAMIRVYTIDLMRLNHEDIFTAVLKPSTISMRCAEKKLKYAIAEGNAEQIGWLVEGDQLELDAAAYAKGVGADLMREYPMATCWRVAGFPDEAKLRLRPVLLAAEGMGEDAPKFMREVLENQGWRPAVNALLSPGSVRVVRRNVLGEPRFKSSGHLPTTVDLV

SEQ ID NO: 534 - protein, 1629 aa, Francisella tularensis
MNFKILPIAIDLGVKNTGVFSAFYQKGTSLERLDNKNGKVYELSKDSYTLLMNNRTARRHQRRGIDRKQLVKRLFKLIWTEQLNLEWDKDTQQAISFLFNRRGFSFITDGYSPEYLNIVPEQVKAILMDIFDDYNGEDDLDSYLKLATEQESKISEIYNKLMQKILEFKLMKLCTDIKDDKVSTKTLKEITSYEFELLADYLANYSESLKTQKFSYTDKQGNLKELSYYHHDKYNIQEFLKRHATINDRILDTLLTDDLDIWNFNFEKFDFDKNEEKLQNQEDKDHIQAHLHHFVFAVNKIKSEMASGGRHRSQYFQEITNVLDENNHQEGYLKNFCENLHNKKYSNLSVKNLVNLIGNLSNLELKPLRKYFNDKIHAKADHWDEQKFTETYCHWILGEWRVGVKDQDKKDGAKYSYKDLCNELKQKVTKAGLVDFLLELDPCRTIPPYLDNNNRKPPKCQSLILNPKFLDNQYPNWQQYLQELKKLQSIQNYLDSFETDLKVLKSSKDQPYFVEYKSSNQQIASGQRDYKDLDARILQFIFDRVKASDELLLNEIYFQAKKLKQKASSELEKLESSKKLDEVIANSQLSQILKSQHTNGIFEQGTFLHLVCKYYKQRQRARDSRLYIMPEYRYDKKLHKYNNTGRFDDDNQLLTYCNHKPRQKRYQLLNDLAGVLQVSPNFLKDKIGSDDDLFISKWLVEHIRGFKKACEDSLKIQKDNRGLLNHKINIARNTKGKCEKEIFNLICKIEGSEDKKGNYKHGLAYELGVLLFGEPNEASKPEFDRKIKKFNSIYSFAQIQQIAFAERKGNANTCAVCSADNAHRMQQIKITEPVEDNKDKIILSAKAQRLPAIPTRIVDGAVKKMATILAKNIVDDNWQNIKQVLSAKHQLHIPIITESNAFEFEPALADVKGKSLKDRRKKALERISPENIFKDKNNRIKEFAKGISAYSGANLTDGDFDGAKEELDHIIPRSHKKYGTLNDEANLICVTRGDNKNKGNRIFCLRDLADNYKLKQFETTDDLEIEKKIADTIWDANKKDFKFGNYRSFINLTPQEQKAFRHALFLADENPIKQAVIRAINNRNRTFVNGTQRYFAEVLANNIYLRAKKENLNTDKISFDYFGIPTIGNGRGIAEIRQLYEKVDSDIQAYAKGDKPQASYSHLIDAMLAFCIAADEHRNDGSIGLEIDKNYSLYPLDKNTGEVFTKDIFSQIKITDNEFSDKKLVRKKAIEGFNTHRQMTRDGIYAENYLPILIHKELNEVRKGYTWKNSEEIKIFKGKKYDIQQLNNLVYCLKFVDKPISIDIQISTLEELRNILTTNNIAATAEYYYINLKTQKLHEYYIENYNTALGYKKYSKEMEFLRSLAYRSERVKIKSIDDVKQVLDKDSNFIIGKITLPFKKEWQRLYREWQNTTIKDDYEFLKSFFNVKSITKLHKKVRKDFSLPISTNEGKFLVKRKTWDNNFIYQILNDSDSRADGTKPFIPAFDISKNEIVEAIIDSFTSKNIFWLPKNIELQKVDNKNIFAIDTSKWFEVETPSDLRDIGIATIQYKIDNNSRPKVRVKLDYVIDDDSKINYFMNHSLLKSRYPDKVLEILKQSTIIEFESSGFNKTIKEMLGMKLAGIYNETSNN

SEQ ID NO: 535 - protein, 1046 aa, Helicobacter fennelliae
MKIYSFDIGVASIGWAFIENEVLQDCGIRIFTKAENPKNGASLALPRREARGVRKRLARRRGRLNTIKQLLCKEFGLQLEDYLSNDGELPKAYTASKANPLKSPYELRTLALSQKLDSKDLVRVILHIAKHRGYGNKHAKDSKDTESGKVKKAIEFNRKTLAEKGYRSVGEYLYREFFQQSRISQNNGATEFVNVRNKTGNYEHCVAQDMLKDELELIFRKQKELGLHLSDGFEKQLLDKIFEQRPLKSFADKVGKCQFIAGAKRAPKDSISAIEFVALSRIINTLANLSKKSGEMYDKAMVLTILDSVLEKGEMSYYALREAINLDEKIRFADSRLDYSKEIKETEKVKFVECKNLKSFKKVLGNCYKTLERKHIDSIAERIAVIKDVEKLHKELESYCATEQLSLTSEQIQALSHLNFSSHISLSLKALEQILPFMRGEREARSSDADYCIGIDESGESQCLRYDESVEKAGLKALSKDTLKGQILPPLNEFEPYLANPVVARALAEYRKVLNALLKQYGSPHKIHIEYAREAKLNTTERQKYEKEQKDNYAANQAAHKKCQELGLEPSSTNLLKLKLWQEQGGLCLYSGAKITISYLQDPTALQVDHIYPYSRSFDDSYMNKCLVLTKANQEKGNRTPFEAFGTDSAKWGVITTLAQKLPHKKRRRILNTAFNDKEAGFKLRNLNDTSYIARLVADYTETYLEFLSLVESENTTLGKGQKGSKKHIAIVNGALTSTMRYYLGFASKDRDNHLHHALDAVIIGFMNDSVIKAFSDFKKTQETSKAAYYAHTLSKQEYKKQRAFIQLPSGENFRANVLEKAESVFVSKPPRKRVRGALHEESFYSQNDTKLLKSYGGAEGIEKALQLGKIRQIGTKIVSNGAMVRVDIFKHRKSGKFYGVPVYTMDFALGILPNKAVVQGKDKNDVIKDWLEMDSSYEFIFSLYKDDLLLVQKKEMAEPELCYFVSFDTSGASIKVAKHDNNFSTLTENQKLLFSNATKEEVVGKSIGIQNLKVFEKWQVSVLGEVKRTQSYPRENISLASKAKK

SEQ ID NO: 536 - protein, 1220 aa, Alistipes shahii
MAKVLGLDLGTNSLGWALVDESENEYTLIDKGVDIFQEGVARDKNNEKPAVQDRTSARALRRHYFRRRLRKIELLKILIRYDLCPPLPEELLTAWQKEKRYPQDNEFLRWQRTDDNGDRNPYHDRYVALSERLDLGNRTQRWLLGRALYHLAQRRGFLSNRKEAGNEKEDGTVKECIKNLSAEIAAAGCRYLGEYFYGLYQHKERIRDKYTSRNEHYLAEFNAICDRQQLPDEWRKALHRAIFFQRDLKSQKGSVGRCTFEPTKSRCPVSHPRFEEFRMLSFVNNIRITGPGDNAPRPLTQEEFETIRSLFFRKSKPYFDFEEIARRIAGKGKYACKEERTEAPYRFNFARTATVSGCPVTASLQAIFGDDWITEIRSLYLLGAGKNEDQMLNDVWHALFSFNDEGRLRSWACEKLQLTDEQAKAFAAIKLPQDYAALSLNAIGKILVYLRCGYRYDEAVFLANLRAALPKEVYADESRRHEIEQDIASLLLDYKRNPYNKFDSKEHRIADYFSDHGLDASRLMRLYHPSKIETYPDAQPKANGILQLGSPRTAAIRNPMAMRALFRLRNLINTLLREGRIDRDTKIRIEFARGLNDANRRKAIEQYQREREVENRKYAEEIHSQYAAETGREIKPSDDEVLKYRLWEEQQHVCPYTGRQIRISDFVGSAPDFDIEHTLPQARGGDDSQMNKTLCENRFNRETKRAKLPAELSNHVEIMERIESFGWREKMESLQKQIEAQVRRSKSAAIKSEKDDAIQRRHYLQMQLDYWRGKYERFTMAEIPEGFSNRQGVDIGIIGKYARLYLKTVFDRIYTVKGSTTAAFRKMWGLQEEYARKERTNHVHHCIDAITIACIGRREYDRWAQYVADEERYGYGESGKPRFEKPWPTFTEDVKAAADELLVAHHTPDNMTKQTRRKLRVRGRIKLNADGEPIYQQGDTARCRLHQDTFYGAIKQDGEIRYVIRKSLAQLQPTDIDKIIDDAVRDRVREAIDKVGFKTAMNPDEYTIWMNREKGIPIRKVRIFTPSVKHPIALKKQRDLSAKEYKRDYHVVNEGNYCTVIYEGQDKKGKTKRTFELVSNLEAAQYFKASADREARPDLVPQTDTNGFPLKYILKTGTMVLFYENTPAELYECTRKELVKRLYKVTAMAAEGRVQFLFHQEARDQKTLTSLYGAGTSQFCQSNPSPKLRLSVSNFNMLVEGYDFELTVTGEIKFKDDRPC

SEQ ID NO: 537 - protein, 1453 aa, Sporocytophaga myxococcoides
MKTVLGLDLGTNSIGWALIQHDFDSKKGEILGMGSRIIPMSQDILGEFGKGNSVSQTADRTKFRSARRLRERHLLRRERLHRVLNILGFLPRHYAADIDFEKRLGQFFEGKEPKLAYDNNQFIFTKSFGKMLADFRQHQPDFLKDEKSNDLLIPYDWSIYYLRKEALTKKIEKEELAWIILNFNQKRGYYQLRGEEEEENLNKLVEFHSLKIIDVVADEKLNNKGETWYSLLLENGWTYRRSSKVPLFDWKEKVRDFIVTTDINDDGSVKTDKEGNEKRSFRAPSDDDWTLLKKKTEQDIDKSRKPIGAYIYDAILKNPKQKINGKLVRTVERKFYKEELKLILQKQKEFHPELQSTDLYNECIRELYKNNDAHQLQLNKKDFVHLFLEDIIFYQRPLRSQKSSVGNCPLEFRKFKDSEGIEKVEYLKTIPKSNPYFQEFRIWQWMYNLSIYKKDDDENVTRDFLKTIEDWEDLFEFLNHRKDIEQETLLKFLLGKNGVKGKALKVEAGKFRWNYVSDKIYPCNETKALIISKLEKVKGVEEKFLTEEIEYKLWHLIYSVTDKVEYEKALKAFAGKQKLDLVSFVDSFKRFPPFKNEYGAYSEKAIKKILPLLRTGKSWNWMAIDSKVRDRINKIITGEFDEEIKNKVREKAEKHSLKKENDFQGLPLWLAQYVVYGRHSEASFSGKWNSVDDLKKYLEEFKQHSLRNPIVEQVLTETLRVVADIWQFYGKGEKDFFSEIHIELGREMKNTAEDRKEMSAIIQANETTNLRIKALLNELLQDKKVENVRPYSPSQQEILKIYEDGVLSSDIEIPDDIQKISKAAQPTKSELQRYKLWLEQKYRSPYTGAMIPLGKLFTSEYEIEHIIPQSLYFDDSFSNKVICESAVNKLKDSRLGMEFIKECHGMVVETGFGKSVTVFEEETYRDFVVQNYSKNHSKKSKLLLEEIPEKMIERQMNDTRYISKFISSVLSNIVREEVNDDGVNSKNIVPGNGKITTQLKQDWGLNDIWNELILPRFERLNVLTDSKHFTAWSENHQRLLPTVPIGLSKGFSKKRIDHRHHALDALVIACASRNHINFLNNAHAIDKKKNSEEKQKFRHDLKAILCDKKYSDKSEKNYRWIFKKPWDNFTIDSKNALDKIIVSFKQNLRIINKATNRYEKWVDRDGIKVKEWHKQEGINWATRKPLHKDTVSGKVDLKRVTVPEGKILTATRKSLDTSFDLKVIESITDTGIQKILKNYLTSKSNNPELAFSSEGVEDMNKNIRKYNDGKLHQPIYKVRIFELGSKFPLGQFGNKKFKYVETAKGTNLFFAVYEDENKNRNYETIPLNVVIERQKQGLSSVPIKSEKGHKLLFYLSPNDIVYVPGSNEEFSIDRLYRFTDSSDKTANFIPLSVSSLIFSSNKNEQKKIGISYPIQDEFGLGSPQSKNQKSIDGIMIKEKCVKVNIDRLGRVSF

SEQ ID NO: 538 - protein, 1197 aa, Porphyromonas sp.
MSKHVLGLDLGVGSIGWCLIALDEQDQPAEILGMGSRIVPLTTDDLNEFSQGKAISKNQKRTTQRTIRKGLDRYQLRRKVLSEKLAGHGMLPDKDLMQLPVLDLWELRARAASPGEKLSLPEIGRVLYHINQKRGYKHAKSDEAEEVTKRGKEQGYVATVKGRYAELQREGATVGQHFACKLKEHRQESPSGGFFYNYRIKDQVYPREAYIEEFDRIMEVQSVFYPEVLTPAFIQELRDKVIFFQRPLKSCKGLVSFCEFEKQERVVQLKRVNREGKEELQERKITIGPKVAPKSSPIAQLCKLWESIHNIRIYYPDGKERPITLEEKRKLLAYLQTHDKLTFTALKKELKISDKERLWCDKLLKGGIKGDTTRVLLRKALAGYKRYEPLLRMDLELRDFQEIVSGKRLIRPIVDESYLSQPLYRLWHILYSIEEREAMRRALIDQLGFLEEDLDGGLLDKLYQIDFAKQGYSNKSAKFICKLLPHLQGGHGYSQACELAGKRHSAGSLTKEELEERPLLEHIPLLQCNELRQPIVEKILNQMINLVNALRQKYGSIDEVRVELARELKMSREEREETSKRIRSREKENKEIAERIKEYELYPTKSRIQKYRLWQEAGEQCLYCGRSIDVVQFLRGDGVEIEHIIPKSILYDDSSANKTCACSRCNKDKGNRTAYEYILAEGREAEYLDRLETLFHDGKLSYSKRRRLQWKKADIPVDFIERQLRLTQYIARQAQEILRQGIRRVGASEGSVTAKLRHLWGYDDILRELNFERYQSMGETEIVSQEEKDGSITKSERIKDWSKRKDHRHHAIDALVVACTRQGYIQRLNSLNSEEDSLQMQEDSKQMREKMGGQKRPTADKHSILENWLILQPHFSHQEVKSKVAEILVSFRPGKRTVSTGRNTYLRSGKKVTQSGVLIPRGPLSEESLYGQILRNGEPTYVKKVALESLSEAQIEQIVDPKLRREMVARTQPSEGAKLNPKLLLATPFYSDAAGTQRVRSVRVAIENGKNSIVPLRYNESGKAITFVNPGNNHHVGIYRTSEGKLVESCVTFWQAVDRVRYGIPTIIRKPREVLDQLLLRDDIPEALLAHLPASDWEFVEYLQANEMFLIGLTDEEIQTALAESDLLTLSNHLYRVQKMSSEYYVFRYHLETEVADNKNNTGIIPKFYRLRGPNDTYLKANPRKVKVNLLGEISLP

SEQ ID NO: 539 - protein, 1105 aa, Neisseria meningitidis
MAAFKPNPINYILGLDIGIASVGWAMVEIDEDENPICLIDLGVRVFERAEVPKTGDSLAMARRLARSVRRLTRRRAHRLLRARRLLKREGVLQAADFDENGLIKSLPNTPWQLRAAALDRKLTPLEWSAVLLHLIKHRGYLSQRKNEGETADKELGALLKGVADNAHALQTGDFRTPAELALNKFEKESGHIRNQRGDYSHTFSRKDLQAELILLFEKQKEFGNPHVSGGLKEGIETLLMTQRPALSGDAVQKMLGHCTFEPAEPKAAKNTYTAERFIWLTKLNNLRILEQGSERPLTDTERATLMDEPYRKSKLTYAQARKLLGLEDTAFFKGLRYGKDNAEASTLMEMKAYHAISRALEKEGLKDKKSPLNLSPELQDEIGTAFSLFKTDEDITGRLKDRIQPEILEALLKHISFDKFVQISLKALRRIVPLMEQGKRYDEACAEIYGDHYGKKNTEEKIYLPPIPADEIRNPVVLRALSQARKVINGVVRRYGSPARIHIETAREVGKSFKDRKEIEKRQEENRKDREKAAAKFREYFPNFVGEPKSKDILKLRLYEQQHGKCLYSGKEINLGRLNEKGYVEIDHALPFSRTWDDSFNNKVLVLGSENQNKGNQTPYEYFNGKDNSREWQEFKARVETSRFPRSKKQRILLQKFDEDGFKERNLNDTRYVNRFLCQFVADRMRLTGKGKKRVFASNGQITNLLRGFWGLRKVRAENDRHHALDAVVVACSTVAMQQKITRFVRYKEMNAFDGKTIDKETGEVLHQKTHFPQPWEFFAQEVMIRVFGKPDGKPEFEEADTPEKLRTLLAEKLSSRPEAVHEYVTPLFVSRAPNRKMSGQGHMETVKSAKRLDEGVSVLRVPLTQLKLKDLEKMVNREREPKLYEALKARLEAHKDDPAKAFAEPFYKYDKAGNRTQQVKAVRVEQVQKTGVWVRNHNGIADNATMVRVDVFEKGDKYYLVPIYSWQVAKGILPDRAVVQGKDEEDWQLIDDSFNFKFSLHPNDLVEVITKKARMFGYFASCHRGTGNINIRIHDLDHKIGKNGILEGIGVKTALSFQKYQIDELGEEIRPCRLKNARLSVKLIYPCFRRPEAGIFYIKIRGKT

SEQ ID NO: 540 - protein, 1399 aa, Veillonella sp.
METQATAQLISGHLKGYPIYDYFVGLDIGTNSVGWAVTNRIYELLKFRSHKMWGSRLFEEGQTAVVRRGFRSIRRRLERRRLRLKLLEALFADAMARVDSTFFIRLRESKYHYEDKTTGHKSKHILFIDDNYTDQDYFAEYPTIYHLRADLMENGTSDIRKLFLAVHHILKYRGNFLYEGATFDSNSSLDTVLKRALEQIEFHIFNATSEDALHSILDIVKLQDKTKSDKAKAIESLVDTYITDKVESSCTDKEKKDLLKADKKRLRAFANLILGLNANLTDLFGTIEEIEEDFVKLQITGDTYEEKRDDYAKVWGDTIRIIDDCKSVYDSIILMSIKEPGLTISQSKVKAFNKHKEDLAILKRLLKSDKYIYKNMFKADEKGLANYVHYIKQGRKNETGCSCEDFYKYTKKVVESLPDSSDKAYILNEIELQKLLPLQRIKDNGVIPYQLHLEELKAILEKCKDTFPFLNTVSDGFTVAEKLIKMLEFRIPYYVGPLNPSHSIDKGGFAWVERKEPGQVTPWNFEDKIDREKSAEAFIKNLTNKCTYLIGEDVLPKSSLLYSEFMLLNELNNLRIDGKPLEQAVKMHLIDAVFKKEHKKQTKNRIIEFLKDNNYILGKHKPEVDGLDESIKGDLASYRDMKRILGDDFDVSMAESIITSITIFGESKNMLRETLRKKFGSILSEDQIRSLAKLRYRDWGRLSKKFLIGIDGCVKGEDGTPGTIIDMMRNTSHNLMELLGDTFSFMDVIIEENDKLTKGQVVDPHEIIEELGLSPAVKRAVWQALRIVDEVIHIKKALPSRIFVEVARTNKDEKKKKDSRKKRLQELYKSIQKESPEWLSVTRDESDKLISNLDRADDSSLRSKKLYLYYTQMGRCMYSGRVIDLDQLNTDKYDIDHIYPRSLTKDDSFDNLVLCERQENAKKSDNYPIDPDIQNARKPFWTFLKDQNLISSRKYERLTRVLPLEADDLTGFIARQLVETNQSVKAVTTLLRRLYPGVDVVFVKAENVTDFRHDNDFIKVRSLNHHHHAKDAYLNIVVGNVYHEKFTRNFRKFLKKNGAKRTYNLARMFDFDVMSTNAKDGKAWDIKTSMNIVKKMMASNDVRVTKRLMEQKGALSDATVYKASVAGKAKGGAYIGMKTKDSVFSDVSKYGGRTSIKNAYSIVVEYTGKKNEIIKEIVPLPVYLINRNKTDQELIHYIVSIIPQAKNVSIIYKKLCINQLVKVNGFYYYLGGKTNNYFWIDSAIQVVIADEWIPYLKVLEKFDVMRKQNKELKVGTVSTSIQNQGKKVVIKILEERNVEFFSYLVGKLHSSIYSKMKGNKAGELATKSLEIFVNMSLENQCIYLMELLNLLTNKKAPDVKPLGITASRGTIGSKVSNQDEFKIINESITGLYSNEVTIV

SEQ ID NO: 541 - protein, 1338 aa, Coprococcus catus
MKQEYFLGLDMGTGSLGWAVTDSTYQVMRKHGKALWGTRLFESASTAEERRMFRTARRRLDRRNWRIQVLQEIFSEEISKVDPGFFLRMKESKYYPEDKRDAEGNCPELPYALFVDDNYTDKNYHKDYPTIYHLRKMLMETTEIPDIRLVYLVLHHMMKHRGHFLLSGDISQIKEFKSTFEQLIQNIQDEELEWHISLDDAAIQFVEHVLKDRNLTRSTKKSRLIKQLNAKSACEKAILNLLSGGTVKLSDIFNNKELDESERPKVSFADSGYDDYIGIVEAELAEQYYIIASAKAVYDWSVLVEILGNSVSISEAKIKVYQKHQADLKTLKKIVRQYMTKEDYKRVFVDTEEKLNNYSAYIGMTKKNGKKVDLKSKQCTQADFYDFLKKNVIKVIDHKEITQEIESEIEKENFLPKQVTKDNGVIPYQVHDYELKKILDNLGTRMPFIKENAEKIQQLFEFRIPYYVGPLNRVDDGKDGKFTWSVRKSDARIYPWNFTEVIDVEASAEKFIRRMTNKCTYLVGEDVLPKDSLVYSKFMVLNELNNLRLNGEKISVELKQRIYEELFCKYRKVTRKKLERYLVIEGIAKKGVEITGIDGDFKASLTAYHDFKERLTDVQLSQRAKEAIVLNVVLFGDDKKLLKQRLSKMYPNLTTGQLKGICSLSYQGWGRLSKTFLEEITVPAPGTGEVWNIMTALWQTNDNLMQLLSRNYGFTNEVEEFNTLKKETDLSYKTVDELYVSPAVKRQIWQTLKVVKEIQKVMGNAPKRVFVEMAREKQEGKRSDSRKKQLVELYRACKNEERDWITELNAQSDQQLRSDKLFLYYIQKGRCMYSGETIQLDELWDNTKYDIDHIYPQSKTMDDSLNNRVLVKKNYNAIKSDTYPLSLDIQKKMMSFWKMLQQQGFITKEKYVRLVRSDELSADELAGFIERQIVETRQSTKAVATILKEALPDTEIVYVKAGNVSNFRQTYELLKVREMNDLHHAKDAYLNIVVGNAYFVKFTKNAAWFIRNNPGRSYNLKRMFEFDIERSGEIAWKAGNKGSIVTVKKVMQKNNILVTRKAYEVKGGLFDQQIMKKGKGQVPIKGNDERLADIEKYGGYNKAAGTYFMLVKSLDKKGKEIRTIEFVPLYLKNQIEINHESAIQYLAQERGLNSPEILLSKIKIDTLFKVDGFKMWLSGRTGNQLIFKGANQLILSHQEAAILKGVVKYVNRKNENKDAKLSERDGMTEEKLLQLYDTFLDKLSNTVYSIRLSAQIKTLTEKRAKFIGLSNEDQCIVLNEILHMFQCQSGSANLKLIGGPGSAGILVMNNNITACKQISVINQSPTGIYEKEIDLIKL

SEQ ID NO: 542 - protein, 1088 aa, Oligella urethralis
MPKEFDPLKPAKYRLALDIGSKSIGFAIIFLKEDVNKLLKPYAIVRSGVRIFGDGRTPAAPGQLGSSLAAERRVKRSIRRQYARKRKRLQRLLRNLKELGFFPDDSKLCKSFEDLNPYELRHKGLTKELKPHEFGRLLMHMAKNRGFQSNRKVDLLADNIDSQAKAETSAMKSAIATLQSRLNGEFETLGAYLYERFKKGETIKSSKTQKGQKAEYEFSISRRMVKQEFDRLWAAQEQFNPELFNEQAKNTLKDTIFFQRNLLPQKVGKCTFLPEHERASKALPSSQYFRIISELNKISFTDAEGLILPISLEQRNKLLKSLRIKQKLSFDRIRTELNLDSTVLINLEHASKDSIEGDKTGYLLSKKEYFGPAWRDLSLETQDAIVTALLTHENEAELVQKLVDDFNIAHDVAKALANARLESQYMRLSKEAIERLIPELEKGVDSQDGYKVPVKYHEATEAAGFGHHSALQENWADFPTLDLKQLHSDDNDKYTVAELPLPYYGKVITRQVAFGTGDVNDPVEKRFGKIANPTVHICLNQVRVLLDEIIAKYGYPYEVNIELARELKQNHEQRQRSIKQQAANKKENEEIRREIKQAYKVEKARIITDSEISRADIEKWRLWRRSKSKLCVYSGKKICETMILNNEVEVDHILPRSRTGDNSYQNKVLVLNKANRIKSNRTPWEAKELFEAQGWSYEDILNRMRALDKHQLFRFAENSMDIWDKNYRSFEARALNDTRYISRVVKDYLKVVCHKDRIVVSNGAHTALIRREFGLNDLLGKKGEKNRDDHRHHAIDACVIGALDRSMLRKLQIAMEVAEKQNSARNFVGLQEPWFNFSTQVRRSIGQIYVSHKPNHNYEGEIFEASIYGLRLISDKRTEKYVGIKRNPETGKTDKPKKSVVVISDPKTQNRYGLRHKFHSEGLPKKYYGLSSSSVFCLEIYRDEKGNWQAYTIPRYEAYRIVKRRGVNALYDNKRSNFEGRPLVMRLMRDDCIAFEKNGVKEVYRIQKINGLKKNITLTRHFDANVDDRYRRMLKAQKAEKAGEDFDSEDLCDDLVFSSFGASSLYSNKARKVTISPMGVLRDPGFKG

SEQ ID NO: 543 - protein, 1377 aa, Lactobacillus brevis
MESNHDGEQVKYTLGLDIGTSSIGYAAIDKHQKPIRAKGKHVIGVRLFQEGQTAADRRAFRTTRRRLKRRKWRLNLLNRLFDPYLSEVDPNFLPRLRQSNLSPKDDNKHFNGSTLFPDKTDAAFYRQYPTMYHLRYALMTEKRKFDIREVYLAIHHIVKYRGNFLNSATVDSFKTSNIDFTSQFDRLNELYRQVILDEPFQINMDQVDEMTNKLLDNDALKLDTQKQVAKLLPVIYNDKPIDKQYTRIATEFSKAILGYKTKLDVILNLDTQNAKDWVIRLDDEDIDDKLPALVENLDESRQEIVTIIRDLYAQITLNAIVPKGKSLSESMVDKYNDHKDHLDLLMGLIHELGDDSAKGIKLREAYTQYVGKSDDKTLNQDDFYAAIKKNLDEDSKRSPKIQRLIEQASFMPKQRTSANGVIPHQLHQLELDRIIENQGRYYPFLKKPNPNTHKPNGGKYKLDELVAFRIPYYVGPLITKRDQEKTSGADFAWMIRKPGQEGEITPWNFDQKVDRMASANRFIRRMTTKDSYLVAEDVLPDASLIYEKFKALNELNMLKVNDSRLSPSQKQDLFNNLFKKQKTIRTKKLQTYIRTNWELPSVMISGLADPDKFNSSLSTYIDFRDIFGEKVDDPNRQADYEEIIEWSTVFEDRKIYQAKLNQLDWLTEPQRKALLTKRYTGWGRLSKKLLTGLKDQNGDSILDQLWKTNDNFMQIQSRDEFAKQIHDENAKQFHEANNVDDILDDAFTSPQNKKAIRQVDKVVQDVVKAVGYAPDKIAIEFTRSLENNPQRTVSRQRQLQAAYKNIPREIMKSGLMAELGSVADSKKVLSDKLYLYFTQMGKDMYEDKTINIDNLPNYDIDHILPQAFIKDDSIDNRVLISKEENARKSNRVPLKFFGAKRMGFWKDLLNNGLISNRKFQNLTTDPEKISKYSAKGFIHRQLVETSQVIRLVANILGNEYSQAGTTIIEVSAKMNRQLREDFHLIKNRNVNDYHHAMDAYLTAYVGDYLYLRYPKLRPYFVYGDFKKAEDQDLNIRNFNFLHDLKDNESLDKIVDSETGEIVWEKHGSVKQLKKVYHYKFMLVSQEVYTRQDALFNQTIYPASDADKRKLIPIKNSKPVDVYGGYSGNIDAYMAIVRVHGKKEDNYKVVGIPMRAVTKLKKAEKEGHDSYLNAVHEVLKPQFTKKKKNRKTGEITETVDEFDVLLGKVYYRQLIVDGNKKFMLGSSSYQYNAKQLVLSDKAMQVLSKNGKVKSQDENQNLIDVYDEILEKVDQYFELYDQRHYRESLHKGRGIFVNLPLSNQYDGSKLTSYGKYETIDAILNGLHANATMSNLRYLGISSPFGKMQASNGLTIDPDSIICYQSPTGLFERQIKLSDL

SEQ ID NO: 544 - protein, 1218 aa, Mycoplasma ovipneumoniae
MNQKKSIAIGFDLGIASVGWAIINSETNEIMNWGSRIFKEREKGAAERRSFRTARRTIRRRQYKSEKLLKLILRSKNIFDFKNIDEIKNSFLKSSSQNSNILDLKIKALNEKIDPKDLAWILHDYLENRGYFYELDDNRETLKYYNGDKFPTQVLSEFFKKNNFFKSSKYNFSNQQWTVEIKKLFEVQNIDEEFQKSFLRLFNYIRDFAKGPGSLHSASEYGIWKFDKEKNEIVQQYDNIWDKTIGKCSIFPNELRASLNFVSYEFFNLLNELSNLRSDFDPEWKLKKEDRDKLINGLLSGEYKNITDNKIEKIIDKDLEIGKDDFKGREILNNKDEIKKKLKDKTKNTNILIKEITNHSEKYKNFKVENFVDHPEHLEALDSICSVLEKYKEKKDRFIEELDKTKVSDKINVLDYFGIINKKDEFINNLLNNKDLTFKKTGSYSAEATRLFVKKMLKTQENSEYLKYNDKEINDIIKQNAKAKPLTKYLNPFIFKDEILPPSVKQTFEQAIAVLNKIIKKYSKDYEISGIFIEIPRDKNDKKAKKKQANKTVKSGLDEIYEVINKKYNLVSLNISKEDLYHKPAPLLKKLKLYCQQDGVDLYTLKKIDIADLINNSSKYHFEHIIPKAYLPDNSLSNLLLTTQSENSKKSNLCAAAYMKSKGADDYKRYVKKINELFNPKLAPKDDSSKIFGLDKKAMLKKLKLLYQEGIDPHQKEEFLSRQLNDTRYSTKLFLEVVKEHFKDNPNFSYEQATKIFTLNGHHTAFIREKILPNNKDRTDNSHHAIDAAIIGIMANKNRHALSSLTIQEGLRQSKYEQIEDGTIIDKQTGEILKNSDYDSKKFELVENISGLVKEKIENAQDKVEIKFSRKMTNSTNSPLFDDTLYGLRQNDDGTYDKVEKINLVNPKSLDNLQDYFADPNPNSGKYLVLMYQSHKSEFEKLRTIFNRPEFNENKNQNPFHAYMDWLVSEKYIDEEEKENAKGANKLIYFDPVANKKTLFKDLRVVTEKNVNKDFEFVNKKQGEKSFRSGKNQLFALVYENKKGQLSSIPVNFLLKKFGSKLDHNFYSLDESNYDQENLKKYKDNLGIDHQSKPIFIIKKSAILKLKVDKEFDFKPENNKAKTSEEKEKVTKKSITIRPDENHYFYISGITKKKKVKDTTFSIKSVSLDKLKQKELQTQGLLNELQFISLDELGNEYESKEQKKLEEYFINKNKKVRK

SEQ ID NO: 545 - protein, 1526 aa, Prevotella sp.
MKNILGLDLGTNSVGWALISVDENGNLVKDIRLGSRIIPMSQDVLGKFDSGVTVSQTAERTEYRSHRRLLERALLRRERLHRVLHLLGFLPEHYAAYIGWDRNDNATYGKFLPETEPKLAWRKADDGGYRFIFMQSFEEMLHDFKASQPSLVANGKRIPLDWTLYYLRTKALTKPIAKEELAWILLNFNQKRGYYQLRGEEEEETPSKRVEYHELKVVKVEATDEGKGGNVWYNVLLENGWVYRRQSKYSLEKWLGQTLPFIVTTDLEADGVTPKRDKDGNVKRSFRSPKEDDWTLVKKRTEDHLEKSGLTVGAFIYHHLLANPSDKVRGQLVRTIDRKYYKRELQAIIAKQMEFHPELCDAELLKACAEELYRNNEAHRAQLLAKDFKHLLVEDVLFYQRPLKSKKSLIANCPYETRQYINKETGEIKDVNVKCIAKSNPYFQEFRLWQWISNLRLLRQADGQDVTAAYIKGNEDKERLFDLLNNQGEIKQEHILRDFLKLKKPKGGEFPLRWNYVDDKIYPANETRHAINKAIKGMAVDKEEKETLGQLLDQPAVAYMLWNLLYSITDRNELARALRRFALTHGVSSVDAFVESFLKVKPFKKEYGAYSEKATKKLLQVMRLGKYWCGDELPEPAKRTKGNKQAVYDEMAHRGICKQTLQNISNIIEENIDERLMGALLNPERPLTELSHFQGLSVSDACYVVYGRHSEVAEIVKWKDADELNTFINNFKQHSMRNPIVEQCVLETLRTVRDVWEQEGQIDEIHVELGRNMKRTAEQRARDTQAIQRNENTNMRISLLLTELKNDPSISDVRPYSPSQRELLKIYEEGALENLTNQDEDIAKISRLAQPSASELRRYKLWLDQKYVSPYTGRPIPLAKLFTPAYEIEHIIPQSRYFDNSFSNKVICEAEVNKLKDNLLGMEFIKKFGGKTKGILDEEAYKLHVTTNYAHNPAKRSKLLMEDLPTDFNSRQLNDTRYISKTVMALLSNVVREEGERETRSKHVVVCTGGVTDTLKKDWGLHDVWHNLVYPRFIRLNNLTGSQNFGYWRYLNEENSKKGEDSKKVFQITLPPECQRGFVKKRIDHRHHAMDALVIACASANIVNYLNNQSAANPHIHENLQRLLCDRKREIRKPWPTFTQDAQAALKDLVVSFKNTVRVVNKASNTYLRYDKDGKKKRFKQEGEGLKAIRKPMHKETYYGEVNLIRKEMVPLKRALDDVNAIVDKELRASIKGLLRDGFNPQQVLANFKAKDFKFDKRDIKKVEVYVSSEKSTPMVATRKSLDTSFNAKRIADITDTGIQKILLNYLKANDNSPEQAFTPEGIAYLNEHIAEYNDGKPHQPILKVRVSEVKGAKFAVGQTGSKKDKFVEAQSGTNLYFAIYEDKEGKRHFETIALKVAAERLKDKQMPVPEINDAGLPLKFYLSPNDLVYVPTDEDRATAHPSIDKMRIYKMVSATDRQCFFLPFTVASVISNKVEFEALNKMERVLDASEYSSAYDSSHVNKVMVKNVCWKLEVDRLGNITKIVR

SEQ ID NO: 546 - protein, 1058 aa, Pasteurella multocida
MQTTNLSYILGLDLGIASVGWAVVEINENEDPIGLIDVGVRIFERAEVPKTGESLALSRRLARSTRRLIRRRAHRLLLAKRFLKREGILSTTDLEKGLPNQAWELRVAGLERRLSAIEWGAVLLHLIKHRGYLSKRKNESQTNNKELGALLSGVAQNHQLLQSDDYRTPAELALKKFAKEEGHIRNQRGAYTHTFNRLDLLAELNLLFAQQHQFGNPHCKEHIQQYMTELLMWQKPALSGEAILKMLGKCTHEKNEFKAAKHTYSAERFVWLTKLNNLRILEDGAERALNEEERQLLINHPYEKSKLTYAQVRKLLGLSEQAIFKHLRYSKESAESATFMELKAWHAIRKALENQGLKDTWQDLAKKPDLLDEIGTAFSLYKTDEDIQQYLEGKLPDSVINALLVSLNFDKFIELSLKSLRKILPLMEQGKRYDQACHEIYGHHYGEKNQQISQLLPVIPTQEIRNPVVLRTLSQARKVINAIIRQYGSPARVHIETGRELGKSFKERREIQKQQEDNRTKRESAVQKFKELFSDFSSEPKSKDILKFRLYEQQHGKCLYSGKEINIHRLNEKGYVEIDHALPFSRTWDDSFNNKVLVLASENQNKGNQTPYEWLQGKINSERWKNFVALVLGSQCSAAKKQRLLTQVIDDNKFIDRNLNDTRYIARFLSNYIQENLLLVGKNKKNVFTPNGQITALLRSRWGLIKVRENNDRHHALDAIVVACATPSMQQKITRFIRFKEVHPYKIENRYEMVDQESGEIISPHFPEPWAYFRQEVNIRVFDNHPDTVLKEMLPDRPQANHQFVQPLFVSRAPTRKMSGQGHMETIKSAKRLAEGISVLRIPLTQLKPNLLENMVNKEREPALYVGLKARLAEFNQDPAKAFATPFYKQGGQQVKAIRVELVQKSGVLVRQGNGVADNAPGSIVRTDVFIKNNKFFLVPIYTWQVAKGILPNKAIVAHKNEDEWEEMDEGAKFKFSIFPNDLIELRTKTECFLGYYIGPDRHNGSISLREHDSEISKGNAGVYRVGVKLALSLEKYHIDELGKNRRICRPHQRRPVR

SEQ ID NO: 547 - protein, 1161 aa, Mucinivorans hirudinis
MKKILGLDLGSASIGWALVEETEQMQYNIVSLGSRIIPYNGTEGQEFEKGTGESRNSLRTKARTARKGYDRYQLRRKNLEKILLQNGMYPNEQVRALQKLELWKLRADAPNVQISLPELGRLLFWLNQKRGYKSSRSDANLDKKDTEYVATVKSRHQKIKDAGQTVGQYFYGQILENEYHRIKEQVFPREAYIEEFDAIVARQKEYYPTILKQELIDKIRNEVIYFQRGLKSQKGLVSVCEFEGREFNGHFGGPKVAPKSSPIFQLGKIWENINNIKIADIELTAEQKLVFFNYLNCHERITEAKIRELLKLSKDSRLNGQLKNGLTGNKTYSQIASCFGNKIGEYERLFKFELEVIESEKLEYTYHPKSHIPVGEKRRKYISENVEKEPYYRLWHTIYSIKDKDECRAALIKNFGIEEEIAEKLASLDFSAGGFGNKCAKVIRKILPYLMEGDKYNVAMDYAGYNHSFSQTKDENLQRVLLDSINHLPKNSLRQPIVEKILNQMINLVNEVIKQWGRPDEIRVELARKLKQSKTERNDDDNFMRKRERENEIIKADLAKYGLKATRNNVIKWRLYHEIDDKDKKLNARCIYCGQPISLTEAILGNNVDVEHIIPKDKLFDDSQSNKTLAHRSCNSGKGNKTAYDFMKDKPQFEEYVARVEELYKKHLISLTKKRKFLMSEDKIPSDFIDRQLRESQYIARKSREILQTVCRNVWSTDGGVTAHLRKLWGWDDVTMNLQMPKYKGIGMTEIVEWESNHGKNQHTQEVIKDWSKRDDHRHHAIDALVVACTRQGYIQRINTLNSSETKDEMHRKVAGSLVEFNQKHTLLNKYLITEKPFTTSEVEDVVSKILVSFKAGKKAATPGKRKVGKRGNKQVVQDGIIIPRGALHADSVSGSIKQYDPTGNFENHNVIKYKVGVGKGYLFDGKDDKKKIDKTIDCIVDKKIRDLIKQRAEESNYSLKKMFETPILFNQRAVFSVRCKTGNKAVVPIRNGYVVPDNNHHTAIYKYDGGLKEQCVSLMQAIERKRYNLPIIIKNPKEIYDKITEIANINQLLFDSLPKLDWEFVTTLQKNDMFILGMDYSATEEALADGNYRLLSEYLYKVQNISDGIYRLCHHTITKFDLSKANKPDKRFYNIQSLKAWNTLNPQKVKINILGQIERQ

SEQ ID NO: 548 - protein, 1434 aa, unidentified
  source 1..1434: note = Bacteroidetes oral taxon 274
MKNILGLDLGTNSIGWAYVKQAQNDSEKSEIAELGVRVNPLTVDEKTNFEKGKPISTNADRTLKRGARRNLQRYKLRRQELIELLKDYQVISDKTILAEDGKETTFETLRLRVKSAKEQVSLEELARILLMINKKRGYKSSRKAKNEDEGQLIDGMEIARRLYDENLTTGQLSLQLLKEGKKSLPDYYRSDLQHELDKVWNFQKQFHPDILTDEFYTSIQGKGQKATRESFSSKYGIDTAENKGSREEKKLQAYQWRADATHKELTKEELAFVITEINNNINNSSGYLGAISDRSKELIFANETVGEYLWKQIQNDPHTSLKNQVFYRQDYFDEFERIWETQSGFYPQILTESLKNELRDILIFYQRKLKSQKALVSICEFESKEIPLKDKQGNPISKNGIPVTKLVGPKVAPKSSPLFQEFKIWQNLNNVLVRPKGSRKRKVTTNQQSTLLEGQEPVFELNLEQKELLFEELNLKGNLKTDYCLELIGYSAKEWEMNYPTLEGNKTNKALYEAYLKIIDSEGYDAKKLLKVKTDKDDINLDDIKVSASEIKTMISDIFNELGINTKILDFDAELERKQFEAQASYRLWHLLYSYEGDDSKSGNELLYRLLEDKFGFKREHSKTLANVSLLSDYGNLSTKAIRTIYPYIKENKFSTACELAGYRHSKLSISKEENENRTLKDTLDVLKKNSLRQPVVEKILNQMINLINELIEKHSEKDEKGNIVKYFKFDEIHIELARELKKNAEERRELDSKVREGKDRNEKIITILKSEFGLPYPTKNDITRYRLYEELKDNGYKDLYTNTYIPREKLFSKEIDIEHIIPKSRLFNDSFSNKTICYRQDNLNKGERTAYDYIEGLGKTQLDEYLNRVENLYTNKFITKAKYRNLLKKESEIGDGFIERDLRETQYIAKKAKEMLLQITRHVVSTTGSITDRLRDDWELVNVMRELNLPKYKVLGLTEIQERKNGQTVEVITDWTKRNDHRHHAMDALTVAFTKHSHIQYLNFLNARKDEKHKEYSNIMGIQQLETEKTTDKDGKDRRVFKTPIPNFRQVAKEHLESILISHKTKNKVVTRATNKIAGSKKQQETLSPRGQLHKETVYGKYRRYVQKEEKIGSKFDLQTIERVANPLYKRLLTKRLEENGGDPKKAFTGKNALAKSPIYLDETQTQQLPEKVKLVWLETDFSIRKDITPDNFKDEKSIDKVLDEGIKRILKDRLKSFDGDAKRAFTDLEQNPIWLNKEKGIAIKRVTISGVSNAEPLHTKKDHLGNEIFDDTGKPIPVDYVSTGNNHHIAIYRDENGNLQEKAVSFFEAVTRANQGLPTVDKTYNQHLGWQFLFTMKQNEMFVFPNKETGFDPQEIDLLDPKNKKLISPNLFRVQKISTKNYFFRHHLETSVETHNALNGVTYKSQLGLNGITDIIKVRINHLGDIVHIGEY

SEQ ID NO: 549 - protein, 1131 aa, Rothia aeria
MSEHTKYRIGIDVGDRSVGLAAIEFDDDGFPLSNLAMVTYRHDGGLDPTTNKSPKSRKETRGVALRTMRMRRRKKSRLKELDKTLRALGYVVPACEEPQTYEAWKSRALLATTKVEGAQELGEHLVRAVRHMARHRGWRNPWWTLNQLEIASTAPSDTFAKIRERAEKEWPGMVPEEATLGMIGALAASNNVLLRPRTYRKDQPRHSKKLNVLGQEPILVDKVRQEDLLAELRTICKRQNIEDQYEKLAQAVFEQTRPYVPLDRVGKDPLQPNKSRASRASLEFQRFRILDAVAHLRVRVGVSDRRALTDEEHDKAVHFLMGYSKKDVPTWGDVADEIGVEPTHLIAPVIDDVRLNKAPYDRSSTEFEQKMKKKTRARQWWDEANLESRSQLILLVSDPTDETTRLAEVSGLYEVFESWPDEEKEALEGLKVESGRAAYSTDTLNKLSDHMRLKRIDLHEARKIAFGVDDMWHPPLDRIDEPTGQPTVDRVLTIVRRFIFDCERAWGRPENVVIEHARTGLMGPAQRADVLNEIAKNRKKNDKIREDLRAGGINNPTRADIRRNAIVQDQESQCLYCGATIGVSYSELDHIVPRAGGGSSRRENLAAVCRACNDSKKDTPFAVWAKNTSRPVTLEGTIQRLRELKAFKRPKDRRMVDLIIRRLKQTEKDDPIDERSLASTSYAATAIRERIEQYFNEKAEKRDLAKVHIDVYSGSLTRESRRAGGIDKMVLLRGQSDKNRFDVRHHAIDAAVLTLLNRSVAVTLEQRRLIKQQREYSLEKSRRERDNVWRDFMGLGPAAQEKFAKWKKTAYVLADIIKEAISNDAIPVVSPLRLRPQNGSVHLDTVDGVLERTIGDAWTVDQVHRIVNPQIYLAFAGYLGNQKALDPDSSRVLALNDGRKLTAEDVIYVFPEKAASILTPRGVVKIGESVHHVRLYAWKNRKGKAEVGMLRVFGAEFPWLMRESGVKDVLRVPIHTGSQSYRDLSFTVRKNIEKGEAVEIGWLTQNEELEFNPESYLQEGGKDKLAKFLAFLPETRWRVDGFPMPDKLRIRPALLSREEIPEGVFGTEEQSLLEEALTKGLIIATKGLLSLPDVKVLRRNNLGIPRWRGGSYRPVSLDIQRAALAALDEQE

SEQ ID NO: 550 - protein, 1048 aa, Sphingomonas changbaiensis
MKRLGLDIGTNSIGWCLIEDDGDGKGRIIDIGARIFSDGRDPKSGASLAVDRRAARAMRRRRDRYLGRRTAFLKALKRFGLMPADESAAKLLADRDPYELRARALDERLEPHEIGRALFHLNQRRGFKSNRKAERKTKDAEDGKIANGAKALDQAMAESGAETLGQFLSSRDTKRVRMGSDAQGYDFYPQRRHVEYEFDTIWSRQQQHHPALLTEEARKKLHDILFFQRPLKEQEVGVCTFVHNECRLPKAHPLFQERRLYEEVNQLEITTPGAPNRKLTMDERDALILELRSRKERSFDSLAKRLKLAPGQSFNKASESRTRLRGDEVYAVMAHKKRFGDRWPHLDRDRQWAIIKRIIEEEDPDKLHAFLTGEWGLTDEQALATARAPLPELYGRLGPTATARILEELKKDVITYDEAVRRAGWHHSDDRTGEILPQLPYYGELLTRDIPPGTQDPNDPPEQRWGKITNPTVHIGLRQLEKLVNAIIKVHGRPDQIVVELARELKLNEKDKEEHNRRIRRDTAAAQLRSAKLQSEGIPDTGANRMLLRIWEELNPGEVLDRRCPYCGEPVGMRMLFAGEADIDHIIPYSRSLDDSAGNKVVAHRSCNRAKGNRTPYEKWVHDPDRWDVISTQVARLHKSKQWRFGPDAMARVEKDGGFIARQLTDTQYLSRLAGRYLSSLYPTKDDGSVYVIPGRMTAMLRRRWGLNSLLPDHNFVDNEHSNAPKNRLDHRHHAIDAAVVAVTTRALMQEIARTAGRAEDKDLDRLFEDLPQPWEGFREELGEKLVRVTVSHKPDHGRKGLPPKNRDVTAGRLHNDTAYGLTGDVAADGKTPIVVHRVPLMSLKPADISDPDRIPDPALRSALHRATDGLSGKAYDAALAGFAKTHPQFAGIRRVRVREPLTVIPIADRDGRPFKAYKGDANSRVDIWRMPDGKWLSDVVTMYEAHRRDHSDRRPHPAAKKLMSLRQNDMIAVERDGAPRQIMVVKQIWPTQINLVEHKETGNLKDRHSNETDPFRFFAPTAGGLKKMKARQVRIDPLGRIFDPGPR

SEQ ID NO: 551 - protein, 1027 aa, Bdellovibrio exovorus
MKYTLGLDVGTNSIGWAVLELNTNGEPQRIEKLGSRIFTDGRHPKDGTTLASKRRQKRHERRRRDRLHQRKKLVLNQLVSMGLFPQSEQEQQDLKSLDVLTLRANGVSKQLSAYELGRVFYYLNLKRGFKSNRKGGSEEDKANKISERIKKLQEQLKENDFKTVGQYLHDRYIKGLSTKATIENDFHLLRQLIEDEFDFIVETQSKFFPEISDEQWNTLRNRMFHQRPLKPVETGTCSLFEDKKRTYKYMPSFEEYRFLTELFNLSYQDENFHSHSLSSEQIFKVFHELKNTREATYTKIKKLLKLPSDLSFSIERSKSKDKIKISTTNHFFSKSLLFAEEWASLDLKLKDEVAEIYFSDMSVEEIKKGLLQLKIDSEIIENLLEEKVPNVQEATCSYSKEALQKIVSLILEEERHPTLIVDDLFKNEKEETSLIDRLDYYGASIPDSMQPIPQHIKDNNLTLNEDEKRYGKIANPTVHAALNQIRQVVNDLIEQYGKPTNIHIEFARDLKKSKEERDFDNRKKKKNEELNEQVRDFIEKHNQKPSAFNFERVKLWFELDAMNNQVCAYSGKTISARMVLSDEVQVDHILPFSRTLDDSLANKVLVLASENVKKRNRTPYEAFGQDTEKWASIQELAKRLPYHKQWRFAEDAIKKFEEKDQFLQRHLNDTRYISKIAKKYLGSITDPYKIVASRGQMTSIIRGKLGLNQFIQKPDGTKNREDHRHHAIDALTVALTSRSYLKRISDASARNQDPNRIPIPEPWKGFIKDADVKFNEIIVSHKVDHGKNGPFMEETCFGLIKNPNKYEEENDFKLITTKSLDSVKDPSTIRSQSLQNLAEKSGVISLAKSGVKKLRVYDVTKENPADIGLIESGLAKITHGKDKQHVKHYQKGDINYLAIWCLPQNITLKSDNHKKRKTDYIFTAIKTFDLNSKNPNDLRPHPAAKLVTKVYKGDTVALEVNNQLNYYIVKSIRAANKKLYFLKINQSSELANETQFIPAYTKLVDYKFRKVSVSPTGVITDNGPLLK

SEQ ID NO: 552 - protein, 1052 aa, Haemophilus sputorum
MKNTSLNYVLGLDLGISSVGWAVVEIDEKENPLSLIDVGVRTFERAETQKGESLALARRLARSARRLTQRRVARLKKAKRLLKSENILLSTDECLPHQVWQLRVEGLERKLERQEWAAVLLHLIKHRGYLSQRKNESKSENKELGALLSGVANNHKLLQQTTYRTPAELAVKKFEVEEGHIRNQQGSYTHTFSRLDLLSEMELLFSRQQHFGNPFTSEKLLENLTALLMWQKPALSGDAILKMLGKCTFENEYKAAKHTYSAERFIWITKLNNLRIQENGLERALNDNERLALMKQPYEKAKLTYAQVRSILNLSDEAIFKGLRYSGEDKKTSETKTVLMEMKAYHQIRLALEKNDLKTEWAELKVNSSLLDEIGTAFSLYKTDEDISTCLAGKLSQPVLNALLENLNFDKFIQLSLKALHKILPLMQQGLRYDEACAEIYGDHYGKKTEENHLLLPQIPADEIRNPVVLRTLTQARKVINGVVRLYSSPARIHIETGREVGKSYQDRRELEKRQEENRKQREKAISEIKTLFPNFSGEPKAKDILKMRLYYQQNAKCLYSGKPLELHRLLEQGYVEIDHALPFSRTWDDSFNNKVLVLANENQNKGNLTPFEWLDGKNNSERWKAFKALVETSAFPYTKKQRILSQKLDEKGFIERNLNDTRYVARFLCNFIADNMHLTGEGKRKVFASNGQITALLRGRWGLAKSREDNDRHHALDAVVVACSTVSMQQKITRFVRFEEGNVFTGERIDRETGEIIPLHFPAPWKFFREEVEIRIFSDNPKLELENRLIARPQANHEFVQPLFVSRMPTRKMTGQGHMETIKSAKRLNEGLSVIKMLLTKLRLKDLESMVNREREKELYEALKARLEAFNDEPAKAFAEPFMKKGGAIVKSVRVEQVQKSGVLVRDGNGVADNASMVRVDVFTKGGKYFLVPIYTWQVAKGILPNKAVIQGKNEEDWEVMDDATFRFSLHQNDLVKLVTKKKTIFGYFNGLNRATGNIDIKEHDLEKSKVKDGIHQSIGIKLALSFEKYQVDELGKNIRLCKSSKRQAVR

SEQ ID NO: 553 - protein, 1104 aa, unidentified
  source 1..1104: note = Eubacterium rectale
MKYILALDIGIASVGWAILDKESETVIEAGSNIFPEASAADNQLRRDMRGAKRNNRRLKTRINDFIKLWENNNLSIPQFKSTEIVGLKVRAITEEITLDELYLILYSYLKHRGISYLEDALDDTVSGSSAYANGLKLNAKELETHYPCEIQQERLNTIGKYRGQSQIINENGEVLDLSNVFTIGAYRKEIQRVFEIQKKYHPELTDEFCDGYMLIFNRKRKYYEGPGNEKSRTDYGRFTTKLDANGNYITEDNIFEKLIGKCSVYPDELRAAAASYTAQEYNVLNDLNNLTINGRKLEENEKHEIVERIKSSNTINMRKIISDCMGENIDDFAGARIDKSGKEIFHKFEVYNKMRKALLEIGIDISNYSREELDEIGYIMTINTDKEAMMEAFQKSWIDLSDDVKQCLINMRKTNGALFNKWQSFSLKIMNELIPEMYAQPKEQMTLLTEMGVTKGTQEEFAGLKYIPVDVVSEDIFNPVVRRSVRISFKILNAVLKKYKALDTIVIEMPRDRNSEEQKKRINDSQKLNEKEMEYIEKKLAVTYGIKLSPSDFSSQKQLSLKLKLWNEQDGICLYSGKTIDPNDIINNPQLFEIDHIIPRSISFDDARSNKVLVYRSENQKKGNQTPYYYLTHSHSEWSFEQYKATVMNLSKKKEYAISRKKIQNLLYSEDITKMDVLKGFINRNINDTSYASRLVLNTIQNFFMANEADTKVKVIKGSYTHQMRCNLKLDKNRDESYSHHAVDAMLIGYSELGYEAYHKLQGEFIDFETGEILRKDMWDENMSDEVYADYLYGKKWANIRNEVVKAEKNVKYWHYVMRKSNRGLCNQTIRGTREYDGKQYKINKLDIRTKEGIKVFAKLAFSKKDSDRERLLVYLNDRRTFDDLCKIYEDYSDAANPFVQYEKETGDIIRKYSKKHNGPRIDKLKYKDGEVGACIDISHKYGFEKGSKKVILESLVPYRMDVYYKEENHSYYLVGVKQSDIKFEKGRNVIDEEAYARILVNEKMIQPGQSRADLENLGFKFKLSFYKNDIIEYEKDGKIYTERLVSRTMPKQRNYIETKPIDKAKFEKQNLVGLGKTKFIKKYRYDILGNKYSCSEEKFTSFC

SEQ ID NO: 554 - protein, 1397 aa, Joostella marina
MKKVLGLDLGTNSIGWALVNEATKEEKKEGKSSEIIKLGVRVNPLTVDEKTNFEKGRPLSTNADRTLKRSARRNLQRYKLRRRNLIEILIKNGFITKDTPLTETGKDTTHQTLKLRAKSAKEKVDLKDFAKILLTINKKRGYKSSRKVNSDEDGLAIDGMAVAKHLYEQNLTPGQYVLNLLQKNKKYVPDFYRSDLQEEFKNIWNNQKTYYFDILTDTLFEELKDKNKSQTWAICKKPFDIAGIKQIGKASDKRLERYKWRTEGLTQKLNLEYLAIALQEINNDINKSSGYLGAISDRSKELFFNKETVGENLYRQLVKTPHTSLRNQVFYRQDYLDEFETIWETQAKFYPQLTHTLKEEIRDVIIFYQRKLKSQKSLISFCQFESWEQTYIEKETGKSKTRTVGRKVIPKSSPLFQEFKIWQNLNSLEFRNSDEGEIIEFIKLDEDIRQTVFEELNLRGNLKPNDVLKILGNYISLGKVSQWKCNFEEIEGNRTNAALYNVYQIIAENEGYGFDWAKKTASEINKELKNIFPQLGIDASILDFDFTQANFDKQTSYQLWHLLYSAEEDFKISEEDKVLYGNSSVSLKKKLHQKYGFKPEYTKLLTNISLQPDYGNLSAKAICNILPYLKENNVYSEACDLTGYNHSNFLTAEEQAKRPLKPILELLKKNSLRNPVVEKILNQMVNVVNQVIETYGKPDEIRIELTRELKKSAKERANMTKSIADATRRNDDYRKTIIKEFGIPNPTKSDVVRYRLWQELASRGYKDIFTDTEIKPQELFSNKIDIEHIIPKALLFDDSFSNKTLAFKKDNLKKANRTAYDFIANDYAPNLENYIERVESLHKDRKITRAKRNKLLMLQSKLPDGFIERDLRNSQYITKEAKKMLYEVCRTVVSTSGSITDKLREDWDLINVMKELNFPKYKALGLTEKIERYDIGAEKMKEVEIIEDWNKRNDHRHHAIDALTVAFSTHSHIQYLNHLNARRDEGHKKHAAIIAIESTITEKEGNKKRRFIAPLPNFRLQAKEHIESILVSFKNKNKVVTNNINKTKRIKKDKFNTKVQLTPRGQLHKETIYGKIKQPLEKHIKLNKSFTLEQAKLIIDKRQREKVLNHLEKYAHNSDIAFNSKTLKKNPLLISDEPLKEVLCFEEVFTIRKDISYDNFKNEKQLDKVIDEKVKQALKERINQYNGDFREAFSDIERNPIWLNKAKGICVKRATIKGVSNAEPLHTAKNHLGEEVLTENKEQIPVDYVSTGNNHHVAIYEDEDGNLQEKVVSFYEAVIRVNEGLPIIDKEYNKSLGWTFKFTMKQNEMFVFPSEDFNPTEIDLLDQKNASLISPNLFRVQKFTIKDYFFRHHLETTVENNNTLKNTTWRREGLSGIYGIIKIRLNHLGEIVQVGEY

SEQ ID NO: 555 - protein, 1389 aa, Lactobacillus paracasei
MIIRTYELKTITTIAILKMFQLLTGGLSMTKLGKPYGIGVDIGSNSIGFAAVDENSHLIRLKGKTVIGARLFEEGKAAADRRASRTTRRRLSRNRWRLSFLRDFFESHITPTGPNFFMRQKYSEISPKDKARYKYEKRLFNDRTDAEFYQQYPTMYHLRNRLLTDPSKADVREIYFAIHHILKSRGHFLTSGYAKDFNTNKVALNEIFPALQDAYAQVYPDLDITFDENKVNEFKTVLLNEKATPSDTQRALVNLLLAEDGDKDILKQQKQVLTEFAKAVVGLKTKLNVALGTEVDSSEATVWNFSLGQLDDKWAGIESAMTDEGTEILDQIRDLYRARLLNGIVPAGNTLSQAKVDDYAQHHEDLELFKDYLKQLEDDGTAKAIRQLYDRYIDGDDAKPFVREDFVKALTKEVTAHPNAKSPELLERLAQPDFMLKQRNKANGAIPVQMQQRELDQIIKNQSVYYDWLAAPNPVEKHRKSMPYQLDELLNFRIPYYVGPLVTAKEQKAAQGGVFAWMVRKDPDGNITPYNFDEKVDREASANTFIQRMKTTDTYLIGEDVLPKQSLLYQRYEVLNELNNVRVNNEKLSIEQKQQVIRELFERHNSVTIKQFAENLRAHGDYAHIPEIRGLADEKRFLSSLSTYRQLKSLLPDAIDDPAKQADIENIIAWSTVFEDAAIFKTKLKEINWLDSQTITKLSNIRYRGWGQFSHKFLNGLTLGNGHTIIQELFLSNNNLMQILTDETLQKKMTELNADKLKAANINDAIDDAYTSPSNKKALRQVLRVIEDIKRAADGQDPSWLYVETADGGGTPGKRTRARQHQLQEIYANAAHELIDSAVRGELEDKIADKADFNDRLVLYFMQGGRDIYTGTPLNIDQLSSYDIDHILPQSLIKDNSLDNRVLVHAIINREKNATFASTIYAQKMNATWRQWHEAGLISGRKLRNLQMRPDQIDKYASGFVARQLVETRQIIKLTEQIVAAQYPETKIIAVKAGLSHQLREELEFPKNRDVNHYHHAFDAFLAARIGTYLLKRFPNLQAFFTYGKFKKADVKKLRGFNFIRDITHAEDKIVVKDTGEVIWDKKRDVDELDRIYNFKRMLITHEVHFEKADLFKQTVYGAKDSKEAGGKKQLISKKKGYPVDIYGGYTQETGSYLSVVRLTKKAMYAVVKVSTRDAAKLAVAKSISEQKENETLNDIIDEKLSKISKNGKITHELFEVVLPRVGQKTLFKNSKYNLFLVNSDTYMHNYQELWMPREYQKMWKDISLSKYGDAQTEDQLDQIFGFIVSQVNSYFNLYDINQFRKKLNDAADKFATLPMRDTDDMQGKIATIGQLLIGLQANAARSDLRNLDIKTPLGLLQIPNGISLDSDTSVVYQSPTGLLEREVHLSDL

SEQ ID NO: 556 - protein, 1084 aa, Corynebacterium diphtheriae
MKYHVGIDVGTFSVGLAAIEVDDAGMPIKTLSLVSHIHDSGLDPDKIKSAVTRLASSGIARRTRRLYRRKRRRLQQLDKFIQRQGWPVIELEDYSDPLYPWKVRAELAASYIADEKERGEKLSVALRHIARHRGWRNPYAKVSSLYLPDEPSDAFKAIREEIKRASGQPVPETATVGQMVTLCELGTLKLRGEGGVLSARLQQSDHAREIQEICRMQEIGQELYRKIIDVVFAAESPKGSASSRVGKDPLQPGKNRALKASDAFQRYRIAALIGNLRVRVDGEKRILSVEEKNLVFDHLVNLAPKKEPEWVTIAEILGIDRGQLIGTATMTDDGERAGARPPTHDTNRSIVNSRIAPLVDWWKTASALEQHAMVKALSNAEVDDFDSPEGAKVQAFFADLDDDVHAKLDSLHLPVGRAAYSEDTLVRLTRRMLADGVDLYTARLQEFGIEPSWTPPAPRIGEPVGNPAVDRVLKTVSRWLESATKTWGAPERVIIEHVREGFVTEKRAREMDGDMRRRAARNAKLFQEMQEKLNVQGKPSRADLWRYQSVQRQNCQCAYCGSPITFSNSEMDHIVPRAGQGSTNTRENLVAVCHRCNQSKGNTPFAIWAKNTSIEGVSVKEAVERTRHWVTDTGMRSTDFKKFTKAVVERFQRATMDEEIDARSMESVAWMANELRSRVAQHFASHGTTVRVYRGSLTAEARRASGISGKLEFLDGVGKSRLDRRHHAIDAAVIAFTSDYVAETLAVRSNLKQSQAHRQEAPQWREFTGKDAEHRAAWRVWCQKMEKLSALLTEDLRDDRVVVMSNVRLRLGNGSAHEETIGKLSKVKLGSQLSVSDIDKASSEALWCALTREPDFDPKDGLPANPERHIRVNGTHVYAGDNIGLFPVSAGSIALRGGYAELGSSFHHARVYKITSGKKPAFAMLRVYTIDLLPYRNQDLFSVELKPQTMSMRQAEKKLRDALATGNAEYLGWLVVDDELVVDTSKIATDQVKAVEAELGTIRRWRVDGFFGDTRLRLRPLQMSKEGIKKESAPELSKIIDRPGWLPAVNKLFSEGNVTVVRRDSLGRVRLESTAHLPVTWKVQ

SEQ ID NO: 557 - protein, 1466 aa, Myroides odoratus
MKNILGLDLGTNSIGWALVKEDFENKQGEILGLGSRIIPMSQDILGEFGRGNSISQTADRTGYRGVRRLRERHLLRRERLHRVLNILGFLPNHYAKEIDFTKRLGKFINHAEPKLSFDKEFIFKDSFNEMLKDFQQNQPGFIINKHGEEALVPYDWTIYYLRKKALTQKIDKEELAWILLNFNQKRGYYQLRGEEEEENTNKLVEFYSLKIIDVIADNEVNKKGEVWYSLHLENGWIYRRSSKISLVDWKDKVRDFIVTTDVNDDGSEKLDKDGVVKRSFRAPSADDWTLLKKKTEQDIDNSNKTVGAYIYENLLLNPKQKIKGKLVRTIERKFYKDELKQILEKQKEFHQELQNEQLLQDCVRELYKYNEQHQQMLESKDFVHLFLNDIIFYQRPLRSQKSLISNCTLEKRVSRDGVVFPIKVISKSNPYYQEFRLLQWLQNLAIYRKDDDVNVTQEFLNSIESWENLLQFLNAKKEIKQEQLIKFLLEQKGLKGNSLKTAILTYRWNYVTDKVYPMNETRSLIQDKLKKVENVATDFLSFDNEMALWHIIYSVNDKIEYEKALAKFASKHNLDEISFVESFKKFPPFKSDYGSFSEKAIKKLLPLMRFGSVWNKNNIVPSVLDRIDKILTGEYDEKIKIRVREKAEQFQLNQIEDFQNLPLWLAQYVVYDRHSEAEIAGKWNSVKDLENYLKEFKQHSLRNPIVEQIITETLRVVKDIWQQYGNGVQNFFDEIHIELGREMKNTADERKRITNSVTENENTNLRIKALLVELKEDTNIENVRPHSPMQQEILKIYEEGVLNAVENIDEDILKISKTAQPSKSELIRYKLWLEQKYQSPYTGEMIPLSRLFTSDYEIEHVIPQSRYFDDSLSNKVICEAAVNKRKDNQLGLEFIKNHHSEKIELGNGRTAQVLEVEAYESFVKKNYDKNRGKRNKLLLEDVPEKMIERQLNDTRYISKFVTHLLSNIVRKDEVNSKDDGINSKNIIPGNGKITSQLKQDWGLNDVWNELILPRFERMNNLTNSTDFTSTNTNGKIIPTVPLEYSKGFSKKRIDHRHHALDALVIALATRDHVNLLNNESALPKKDRTKEEQKSFRFDLQVNLRNKEKYFNVKEGREKEKFTTFKKPWNTLTQDTRDALENMVVSFKQNLRVINKATNYYESYTDENGNLRLDKYGNPKKELISQKGTNWAIRKSLHKETVSGQIHLDRVKVTKGKIVTATRKSLDSSFNEKSIESITDTGIQKILRNYLKAKDNKPDVAFSPEGIEELNKSISVYNEGKNHQPIIKVRIFEQGSKFPVGETGNKIAKFVEAAKGTNLFFGIYQDKTGKRSYDTIPLNLVIERLKQGLSPVPETNEKGHQLLFHLSPNDLVYVPTIDDNEQLDSNRVYKFTDSSDTTCNFIPSNISAIIFNINSKEQEKRGINYPIQNELGVGSPQSKNQKSFDGFMIKEVCIKLKVDRLGNISKT

SEQ ID NO: 558 - protein, 1146 aa, Sulfuritalea hydrogenivorans
MSGNTHGPLTFGFDIGIASVGWCVLGENRIVNLGVRCFDKAETAKEGESLNLARRTARLMRRRLRRRAWRLTKLARLLKREGLIAEASRIHIPSPVSPWRLRVEGIDRRLTDDEWARVIYHLCKHRGFHWISRAEERKAESDAKEGGRVKKGLSDTQRRMTEKGYRSAAEMVLAEFPDAQRNKQGDYGKALSRILLSDELALLFRRQRELGNPNAGNELEATILGNGNRKSGLFWEQKPPLAGADLLKMLGRCTFEKNEYRAPKASFTAERHVWLTRLNNLRVVVDGTTRSLDDAEHRLVLPLPYKQAGDFTYKQLRTALTKAGLLPEGFKFAGLSYPTGRQLDDPKAKDPESEKLVRLPAWQELRKTLKDKNLETEWEGMAGAATGGNPELLDEIARVLSVFKDGDEVTAELWKLPLPGGKAMIDALSEISFDKFHALSLKALRKIVPHMESGLRYDEACAVAGYHHSQLHAAGAGEHKFLPPFYSRRDKDGRMVFNEELDVPRNPVVLRALNQARKVLNALVRTYGSPTAVHIEMARDLSRPLDERNKVKKAQDEYRERNEKDKAAFAAEYGIAPKSREFEKFQLYREQQGKCAYSLKSLDLHRVLHDIGYAEVDHALPYSRSYDDSKNNKVLALTEENRNKGNRTAYEYLTSFPGGENGERWRNFSVAVETNKAYRLAKRTRLLRKDFSGRAAEEFRERNLNDTRYICRFFKNTVERFLKLDAKVGAGDTAEISAKRCVVLSGQTTAFLRARWGLLKVRGNSDRHHALDAAVVAACSHGMVKRLGDYSRTKELAKVHDGFPDPETGEIIDPVMFQQLHAHFPDPWPHFRAELEARLNVDDTADLRARMELFGTYAPEALETLRPLFVSRAPQRRNSGAAHKDTIYAQPERLKEQGGVTQKVPLTSLTLKDLDKLIDPHRNEKLYAAIRARLEAHGGKADKAFPAGNPLRKPDREGNPTGPVVRTVTMVIDKLSGIPVRGGIAKNDTMLRVDIFRHKKDGKFHLVPVYVYHAVAKEFPNRAIVQAKDEDEWTLIDDKFDFCFSAHPNDLLKITQKSGETIFGYYRGCHSGTAAINIALHDRYAYAEKTTSLAFSKKNPGKPIPNDKLGLIEGIGVKMAANMEKFHVDTLGNIYPAPPEQRRGLA

SEQ ID NO: 559 - protein, 1345 aa, Listeria seeligeri
MQLEIVGGMKVMKKPYTIGLDIGTNSVGWAALTDQYDLVKRKMKVAGNSEKKQIKKNLWGVRLVDEGKTAAHRRVNRTTRRRIERRRNRISYLQEIFTAEMFEVDANFFYRLEDSFYIESEKRQSRHPFFATIEEEVAYHENYRTIYHLREKLVNSSDKADLRLVYLALAHIIKYRGNFLIEGKLDTKNTSVDEVFKQFIKTYNQVFASDIEEGSLTRIEENNEVAKIFSEKLTKREKLDKILNLYPNEKSTDLFAQFISLIIGSKGNFKKFFNLTEKTDIECAKDSYEEDLEVLLARVGDEYAEIFVAAKNAYNAVVLSSIITVSNTETKAKLSASMIERFDKHDKDLKRMKAFFKVRLPENFNEVFNDVEKDGYAGYIEGKTKQEAFYKYMKKMLEHVEGADYFINQIEEENFLRKQRTFDNGAIPHQLHLEELEAILHQQAKYYPFLKVDYEKIKSLVTFRIPYFVGPLANGQSEFSWLTRKADGEIRPWNIEEKVDFGKSAIDFIEKMTNKDTYLPKENVLPKHSMCYQKYMVYNELTKIRYTDDQGKTHYFSGQEKQQIFNDLFKQKRKVKKKDLELFLYNMNHVESPTVEGVEDAFNSSFTTYHDLQKVGVPQEILDDPLNTEMLEEIIKILTVFEDKRMINERLQEFSNVLDEAVLKKLERRHYTGWGRLSAKLLIGIRDKESHLTILDYLMNDDKHNRNLMQLINDSNLSFKSIIEKEQVSTADKDIQSIVADLAGSPAIKKGILQSLKIVDELVGIMGYPPQTIVVEMARENQTTGKGKNNSKPRFTSLEKAIKELGSQILKEHPTDNQGLKNDRLYLYYLQNGKDMYTGQELDIHNLSNYDIDHVVPQSFITDNSIDNRVLASSAANREKGDNVPSLEVVRKRKVYWEKLYQAKLMSKRKFDYLTKAERGGLTEADKARFIHRQLVETRQITKNVANILHQRFNCKKDESGNVIEQVRIVTLKAALVSQFRKQFQLYKVREVNDYHHAHDAYLNCVVANTLLKVYPQLEPEFVYGDYHQFDWFKANKATAKKQFYTNIMLFFAKKDRIIDENGEILWDKKYLDTIKKVLNYRQMNIVKKTEIQKGEFSNATANPKGNSSKLIPRKADWDPIKYGGFDGSNMAYAIVIEHEKRKKKTVIKKELIQINIMERTAFEKDQKEFLEGKGYRNPKVITKIPKYTLYECENGRRRMLGSANEAQKGNQMVLPNHLMTLLYHAKNCEASDGKSLAYIESHREMFAELLDSISEFASRYTLADANLEKINTIFEQNKSGDVKVIAQSFVNLLEFNAMGAPASFKYFETNIERKRYNNLKELLNATIIYQSITGLYEARKRLDD

SEQ ID NO: 560 - protein, 1426 aa, Sphingobacterium spiritivorum
MKHILGLDLGTNSIGWALIKQDFENKQGEILGMGSRIIPMSQDILGDFGKGNSVSQTAERTKYRSVRRLRERFLLRRERLHRILNVLGFLPEHYASQIDFTKRFGKFKEETEPKLVYSNEGFIFKKSFEEMLSDFKTHQPQLLEDNKKIPYDWTIYYLRKKALSRKIEKEELAWILLNFNQKRGYYQLRGEEEEENPNKLIEFYSLKIVDVLADEPQKGKSDIWYSLILENGWIYRRSSKTPLFDWKEKTRDFIVTIDLNDDGSVKTDKEGNEKRSFRAPGENDWTLVKKKTEQEIDSSRKTVGTYIYETLLKNPKQKIKGKLVRTIERKFYKTELKQILEKQKEFHPELRQDDLYSDCVRELYKNNEAHQLTLSKKDFVHLFMEDIIFYQRPLGSQKSSISNCTLEFRKYKDENGTEHTQYLKAIPKSNPYYQEFRIWQWMYNLNIYKKEDDTNVTKDFLNTKADFESLFEFLNNRKEVDQKALLKHFKLNDKTHRWNYVEDKKYPCNETKTMILSRLDKVENISDDFLTREMEQKIWHIIYSVNDKVEYEKALKSFAGKNNLEDNSFFEAFKKFPPFKSEYGAFSEKAIKKLLPLMRMGKFWNYNNISEQSKSRIQKIITGEYDENIKDKVREKAIHLTTETDFQGLQLWLVQYIVYGRHSEAAMLGKWNSADDLEEFLKEFKQHSLRNPIVEQVITETLRVVKDIWQKYGNGAKDFFREIHIELGREMKLPAEERERLTRQISENENTNFRIKALLAEMMDDNSVENVRPFSPMQQEILKIYEEGVLNSDIEIEDDILKISKTAQPSSSDLKRYKLWLEQKYKSPYTGQIIPLNKLFTPEYEIEHIIPQSRYFDDSFTNKIICESAVNKLKDNYIGLEFIKKLGGSIVECGNGKSVAILKHDAYEDFIKKHYANNRSKRNKLLLEDIPEKMIERQMNDTRYISKYISGVLSNIVRVEDGTDEGVNSKNIVPGNGKITTQLKQDWGLNDVWNDLILPRFERMNHLTNSTDFTAWNENHQKFLPTVPVEFSKGFSKKRIDHRHHALDALVIACATKDHVNLLNNQSAKSDTKRYDLKKKLMKFEKVAYNHPQTGERIEREAPKQFLKPWETFTIDAKNHLETIIVSFKQNLRVINKATNYYEKYVEKEGTKVKERVEQKGTNWAIRKPMHKETVSGKIDLPRIKVPKGKILTATRKSLDTSFNLKTIGSITDTGIQKILKNYLQYKDNNPELAFSPEGIEDMNKNIEKFNNGKAHQSISKVRVFELGSKFPLGQSGNKKEKYVEAAKGTNLFFAIYQDKNGKRSYETIPLNEVIERQKQGLSVVDLKGVDDFYLSPNDLVYVPSEDELENISMIDFNKMSSERIYKVVSFTGNQIFFVRQDIATSVVNKAEFSTLNKMERAIDGTMIKETCVKLQIDRLGNISKI

SEQ ID NO: 561 - protein, 1023 aa, Helicobacter cinaedi
MKIYSFDIGVASIGWAFIENEVLQDCGIRIFTKAENPKNGASLALPRREARGVRKRLARRRGRLNTIKQLLCKEFGLQLEDYLSNDGELPKAYTASKANPLKSPYELRTLALSQKLDSKDLVRVILHIAKHRGYGNKHAKDSKDTESGKVKKAIEFNRKTLAEKGYRSVGEYLYREFFQQSRISQNNGATEFINVRNKAGNYEHCVAQDMLKEELESILNAQRQFGFSLKQDFENKLLTKIFEQRPLKSFADKVGNCCFIAGEKRTPKDSLSAIEFIALSRTINTLINLSKESGEIYNRAIILQIVESTLKKGEISYKELREIIRLDERLRFKDPRLDYSREIKEAEKVKFLEFKQLKGFKKALGESFTTLARSQLDEIAEHIALIKDRVKLNEKLESYALTKEQREALSNLSFSAHINLSLQALKQILPFMRGDNGEQCLDYDESVEKAGLKALSKDTLKGQMLPPLNEFEPYLSNPVVARALAEYRKVLNALLKQYGSPHKIHIEYAREAKLSSTERQKYEKEQKDNYAANQAAHKKCQELGLEPSSTNLLKLKLWQEQGGLCLYSGAKITISYLQDPTALQVDHIYPYSRSFDDSYMNKCLVLTKANQEKGNRTPFEAFGTDSAKWGVITTLAQKLPHKKRRRILNTAFNDKEAGFKLRNLNDTSYIARLVADYTETYLEFLPLVESENTTLGKGQKGSKKHIAIVNGALTSTMRYYLGFASKDRDNHLHHALDAVIIGFMNDSVIKAFSDFKKTQETSKAAYYAHTLSKQEYKKQRAFIQLPSGENFRASVLEKVESVFVSKPPRKRVRGALHEATFYSPNDPKLLKNYGGTKGVERALALGKMRKVGAKIVSNGAMVRVDIFRHKSSGKFYGVPVYTMDFALGILPNKAVVVGKDKNGVIKDWLEMDSSYEFIFSLYKDDLLLVQKKEMAEPELCYFMSFNSSIAQISVAKHDNNFSTLTKNQKLLFSNATQEDVSGKSIGIQNLQVFEKWQVSVLGEVKRTQSYPRENISLASKAKK

SEQ ID NO: 562 - protein, 1473 aa, Mucilaginibacter paludis
MKNILGLDLGTNSIGWALIEKDTDQKNGNILGTGSRIIPMSQDIKDEFGKGNSISQTADRTKFRSVRRLRERHLLRRERLHRVLNVLGFLPKHYADQIDFKKRLGKLVNETEPKLVYDNKNFIFKKSFEAMLSDFNQHQPLLLADGKKVPFDWTIYYLRKKALTEKIEKEELAWLILNFNQKRGYYQLRGEEEEENPNKMVAFHSLKIVEVIADESQKGKAETWYSLILENGWIYRRSSKTPLYDWKGKQRDFIVTTDLNDDGSIKTDKEGLEKRSFRAPVEDDWTLVKKKTEQEINRSHKTVGTYIYENLLQDPKQKIKGKLVRTIEREFYKDELKMILKNQQKFHPELNDEHLYINCVRELYRNNQAHQTILSKKDFVHLFIDDIIFYQRPLRSQKSSISNCTLEFRKYKNENGTDQTDYLKAIPKSHPLFQEFRLWQWIYNLGIYQKEDDTNVTDELIKNIDGYQDLFDFLNNKKEIRQDILIKFLVEQTGLKGKPLSSVVAKYRWNFVEDKIYPCNETGTQIRTRLAKVENTPEDFLTAETEIKLWHIIYSVNDKADYEKALKTFAEKHNLDTHSFVENFKKFPPFKSEYGSFSEKAIKKLLPLIRLGKYWSWENIDKKTQERIEKILTGEFDEAIKSRVRDKAIHLTEEDHFQGLQLWLASYVVYGRHSEADNLDKWHTVADLEDYLAEFRQHSLRNPIVEQVITETLRVVKDIWLQYGQGAKDFFSEIHIELAREMKNTGDERKRLTSLVTDNENTNLRIKVLLSELLNDGNVENVRPYSPMQQEALKIFEDGVLNSDIEIEDDILKISKMAQPTNTELKRYKLWLEQKYRSPYTGQIIPLNRLFTADYEIEHIIPQSRFFDDSFSNKIICESAVNQLKDKQLGLEFIKNHSGTIVKLGMGKTAKILDVESYNEFVKGNYTKNISKRNKLMLEEIPDKMIERQLNDTRYISKFIISALSNIVRSESNDDGFNSKNVLPGNGKITSRLKQDWGMNDIWNELILPRFERMNKITDSAVFTAWNENNQKFLPIVPLEFSKGFQKKRIDHRHHALDALVIAASTREHINLLNNEHAKSDKRFDLNRKLRKFEKVAYNDPKTGKRIEKEVPTIFLKPWETFTVDAKNSLESIIVSFKQNLRVINRATNYSESYNDENGALRLGKDGNPLKEKIKQSKGDSWAIRKPMHKDFVYGKVHLQNVKLPKDKFITAIRKSLDVTFDLKRIETITDTGIQKILKNYLHSKENKVELAFSPEGIEDMNQHIERYNDGKKHQPIHKVRVFEIGSRFSLGESGNKKTKFVEAAKGTNLFFAVYQDDNKGKRNYETIPLNIVIERQKLGLHSVPTEDAKGGKLLFHLSPNDMVYVPTSEELEDNLASVNIKRLNTAQRKRIYKVEKASGVECYFIRQDIAYLIKNYDAKTKIGELESQNKLQTTMTDDRLKITDVCVKLNIDRLGSIAETFLGNQYGASKKT

SEQ ID NO: 563 - protein, 1100 aa, Corynebacterium vitaeruminis
MVSLKYRVGIDVGTFSVGLAAIEVDEKDMPVKILSAVSHIHDSGLDPDQQQDAVTRLASSGIARRTRRLYRRKRRRLVQLDKFIEGLGWPVKEFEEYSDPFMPWHARAELAAGFIEDEAERNEKLSIAMRHIARHRGWRNPYSKVSTLHTEVAPSEAFLAIKEEIAKVAGIKIPDDITVGQLVAFCNLGKHRLRGKGGVLSSRLLQSDHANEIIVIGRMQNLDSSLVKQLINEVFKAESPKGSAAGRTGVDPLQPSKKRALKATEEFQRYRIASLIGNLRIREGSGQRRLTKEETSLVFDHLINLKPKSEPSWLAVCEILGIDRGNLRGTATMTDDGERAGAAPPVHETTRRILNCKVKPLVAWWMEANAEDRYAMIKALANSEVDDFDSQSGAKVQAFFAELSDEDNLKLDSLHLPMGRAAYCEDTLARITKRILENGEDLYEARLHEFQTPVDWTPPAPEIGAPVGNPAVDRVLKAVSRWLETAVDTWGVPTHITIEHVRDAFTSERKSREIDRDQQRRAKRNYEVFAEMEKTLGVQNRNRSDLTRYLAVQRQNGQCAYCGTPISYQGEGKDNFEMDHIVPQAGPGSTNKRENLVAVCPSCNRSKGNVPFAVWAAKSTNPNISVKAAVERTRHWLADPGLNATQFAKFRKAVCDRLSRVSIDEEIDARSIESVAWMANELRGRIAQRFAKDGTKVAVYRGELTAKARGASGISKRLVFLDGYGKTRFDRRHHAVDAAVITFITPTIATILAQRDSMRDSQNLLREPAQWKEFTGLEEKDRFMWTRWKIQMEKLSVLLNEALANDRIVVMSNLRLRLGNGSAHEDTIGKLTKLHVGDALSVAMIDRAASEALWCALTRHPDFDPKEGLPADPSRQIRIHGTRLGATDEIGFFPVNAGCIALNGGYVELGSSFHHARIYKITSGKKPVYAMMRVYTVDLLPYRNQDLFTAEIKPQSMTMRQCEPKLRKAIAEGNAEYLGWLVVDDELLIDPTPFSDGQVGNAQQELGPIRRWRIDGFPLNSKFRLRPIQMSTEGLDLKAPSGVKKDRFGPDVRKIVDSPGWRPAVNKLFSSGKVTVIRRDALGRPRLESAAHLPISWKVE

SEQ ID NO: 564 - protein, 1167 aa, Mycoplasma hyosynoviae
MIVEIMEKEKITIGLDLGVGSVGWSIIDSNNKVVDLGSRLFDEPNLALDRRAFRSRRRMIRRKAYRNNKFYKLVLKYPDIFNVKTKEELQQIIKNVNHKYPNILDLKVKALENEVTSGESIAILHDYLENRGYFYEIIEEKEEKKKKDIEKTNQLPSIQQKNFFDKYKVINDVFSKEVTQFSNKEWIKEIEVFSKNQSYLSAEFNEAFMNIFSACRDFALGPGSLHSPSEYGVYNKNPETGKVEQKYNFIWDKTIGKCSFFPEENRAPKNTPSAQLFNLLNQLNNLRIIGDDEWRLTTEDKKAILNSLLSSFKEGKKSSKLTLKNKVLLNCVKDKENPIFSGYDTDKNGDHKFVEIASFGVLINALLDENNANQEILNNINFDQMQEWLPIFDKLCEILVYYPDVNKRISQILELDLLKNNWNMNKEQLEKFANKLSHSFIGATTHSLSLRAINLFLPKMLNTNSNYESCKYEYLHNLNIKNQEQPPQKQTKYISAAFLEKEILPPSVKSTMRESIAIVNAIKKQYANKYEIENIVIEMAREKNSSEKKKKILKLQEKNKEKKKLCDEELKKHGYSQEAIDKVNVHTSLKIKLWIEQQHIDPYIGKEIDFDKMVKDNSFTEIDHIIPYSMSADDSWANKVLVLRTSNQTKGRKIPYDYFETNQLPNWGWNEYVAWCNDKILNGPKELLPKKELRIKKFNNLTLTNFDSNNLGFLARNLNDTRYMSKLFRDKLIEYSKANNNAFKVYTLNGNITSYVRKIIDNTKDAPYMKKDRNDFSHHAYDATILALISKNAYWLFKKIDDQNSRYMIQTNSDGKVYKLDILTGELTSFKNNKSDNKIFDIYAIANMVYEKTKDINREDIKFSRKQVVKTNGELFNKTKYGYKEDKENQEIIYKIEKINLITEELKKLKDYFGNEANETKVQSLLIYQERPEQYKMLNNIYLEFIAKNSKQNPFITYMNELLEKCEIFGIDKKYVEITKRNKIILFNQENKIIQVVGNLKYISDERKKINVFLDEKNKCFQDSFKPFGALVYKDKSKKKIFKEVAINAKIIKFQDKKIDWYDESNYFEDNLRKIKAFKNIDVNANIEQVILIGDKWINDDHQIVYINGVGDTNNSIEYNFIDKNVLIEKNDKSEKKRNKLSIGEFLKIFRPININNLGRILNIKKK

SEQ ID NO: 565 - protein, 1097 aa, Mesorhizobium sp.
MGKGDILFSFDIGTNSIGWCVFALSDNGDPCRILDANARIFADGREPKSGNSLAEGRRAARAMARRRDRYKRRRKAVLRTLTEYGLMPADPKARQALVAKTGDRGPKSEEALADVYSLRARALMEKLPLHHIGRALFHLNQRRGFKSNRKTDRKSNEKGAIETGVNRLLEEMRDTGAPTLGAYLAKRRSDGRPVRVRAGASEQEAEDGKPAKTAYDFYPVRRLLEEEFDAIWEKQYSYHPEVLTEERRGHLFRVMFHQRPLKPAIVGRCSFNSAETRLAKAHPLFQEFRLYKEVNELEVVMPDQSHRKLTLPERDRLVLKLRGQRKATYAALRKELRLRDLRFNKETENRTDMMGDEVTAALADKAVFGNRWSGFSTDEKWRIVERLREEEDPFALHEWLVSEHGLSDAEAEQAAKVHLPDGYGRLGPTAVSTMLEELKADVITEADAARLAGYDHSLARADEDGLDRLPKYQEVLERRIPPGTNDPDDPYDIAKGRITNPTVHIALNQFRHVVNALARRFGKPDQIAIELARELKLNDRQKDEVNRVIGRNTRAAALRSQKLRDIGQKDNGYNRALLKLWEELNPDKPEDRVCVYTGRPICISMLFSGEVDVDHILPWSRTMDDSQANRILCVVEANRVKANRAPAEVAEWGGRYDEILERAARLPRNKRWRFARDAMEKYKENEGFLARQLTDTQYLSRLAREYAEALYPTEEPDRLGELRRRNHVRVIPGRLTEMLRRGWGLNALLPDHNFGAGQAKNRKDHRHHAIDAAVVGVTTRGLLQRISTEAGLREKLALEETIADIPMPWPGFREELKAAIDRAVVSHKPDHGTLPKPGEHGRTAGQLHNDTAYGITGETDARGNPIVVRRKPFLSLTDKDIPSIRDTELRGRVYSATSGLSGRELSAALDYFRKTDKQFRGIRHVRVTESLSVIPIRDRDGNIYKGYKGDANFRYDVWELPDGKWKADVVTMFDAHRPDRAAEERRPHPAARKVLSLKQNDMVACEHPKDGYTIGRVVKFNTAGQIYFAAHNEGGSLKARDADRADPFKYFSKSASGLKEIAARQVRIDATGQVLDPGPQDRESRLARNKRLERERA

SEQ ID NO: 566 - protein, 1110 aa, Sphingobium sp.
MTARTHKIWRLGADLGANSLGWAAIELSAPVDGKPIAILHAGSRIFSDGRDPKSGASLAVDRRDARAMRRRRDRLQQRQRALIKYLIADGLFPADENERKAMATIDPYAVRARALDEALTLPEVGRALFHLNQRRGFKSNRKADRKADEDAGKIAIGIDRTRDAIRQAEEEAGAEPGSWTYGKWLYERRASATDANAIPSVRTRLRPETDEHAKGDGYDFYPGRALMEAEFAAIWEAQAAHHPDALTNEVHDRLHEIIFYQRPLKAPQIGVCTLIRGDQRLPKAHPLFQKRRLLEELNALTIVRPGEMAQRLTREERDTLFLKLKDKAKVSFVSLRKTLKLDPDARFNKESENRSDLKGDEVAAAMGAKTRFGNRWVHLSIEEQWDVIARLEEVESDAEDAACRAWLAATFDLTPEQIRAVTNAPLPPGYSRFGKVATQRLIDALRDGEKDGRVLVYSEAVAAAGLGHHSDLRTGEIFEDAQGRPQLPYYGVALERHIMPGTGNPDHSDEMRIGRLTNPTVHIGLNQLRRIVNTLIRAYGPPAEIAIELARELKLTDDDKKRINKENNENRLAAEKRSEKLLTIGRPDTGANRALLKLWEELNPANVLDRRCIYTGTQISVDMLFSAAVEVDHILPFTATLDDSNGNKIVCMREANRTKRKQSPYEAWGHTDRWEEIAARAAQLPRNKRWRFEPDAMEKFKDESGFQARHLVDTQYLARLSREYLETLYPGSGEGSSHIWVSPGRLTEMVRRKLGLNDLLPDHNFGGGADQAKNRLDHRHHAIDAVVVAIVDRSMLTEISRVSGLEGAEGRERIIIPPPWDEFRNDLRTAVNAITVSHRTDHGTISKAGLPKGKDATAGRLHNDTAYGFTGETDAKGNSIVVRRVPLASFKKLADLDRIRDTDLKAALYQHLEGLEGKAFEKAVMDFPNLEWHPFGNVRRVRVTEVLSVIPISDQNGRIYKGYKGDSNYRYDVWELPGGKWEAEVVSTFDAHQPDWVSKIRSRSPTARKVLSLQQNDLIAVERAHETRELMRVVKFRQNGEITFAPPQEAGSLKRRDATPNEDDPFKYFAVAASSLQKAKARQVRIDELGRVLDPGFPARTARRKTRKST

SEQ ID NO: 567 - protein, 1419 aa, Chryseobacterium sp.
MMIKNILGLDLGTNSIGWALIKQNFENKYGEILGMGSRIIPMSQDVLGEFGKGNSVSQTAARTGYRGVRRLRERFLLRRERLHRVLNVLNFLPEHYASQIDFEKRFGKFKYETEPKLAYNNDGFFFKNSFDEMLGDFKDHQFHLLENGRKVPYDWTIYYLRKKALSQKIEKEELAWILLNFNQKRGYYQLRGEDFEEEKDRVFVRLKVDRVVDSGENIKGKILYDVYFENGWKYEKQIVKTEDWIGRTKEFIVTESILKNGDTKRTFKAVDSEKDWIAIKTKTEQEIDKSHKTVGAYIYEALLQNPKQKIKGKLVRTIERKFYREELKKILERQKEFHPELQSDDLYNDCIRELYRNNEAHQITLSKKDFVHLLLNDLIFYQRPLRSQKSSVSNCTLEFRKYKDENGVEHAQYLKTIPKSNPYYQEFRVWQWMFNLNIYRKDDDTNVTKEFLSSTEDYETLFEFLNNRKEVDQKALLRHFKLNEKTHRWNYVEDKKYPCNETKTMISTRLEKVENYPSDFLTREMEQNIWHIIYSVNDKIEYEKALKSFAHKNNLDENSFFEAFKKFPPFKSEYGSFSEKAIKKLLPLLRLGKYWNWESIDRKSQGRIEKIITGEFDGNIKDKVREKAIHLTAENDFQGLQLWLAQYIVYGRHSEASMIGKWNSADDLEEFLKGFKQHSLRNPIVEQVITETLRVVKDIWLKYGNGAKDFFSEIHIELGREMKQTKDERVDATKRITENENTNLRIKALLAEMMNDNSVENIRPYSPMQQEILKIYEDGILKSDIEIDDDILKISKTAQPSSSDLKRYKLWLEQRYKSPYTGQIIPLNKLFTSEYEIEHIIPQSRYFDDSFSNKIICESAVNKLKDNYIGLGFIKQFGGMIVECGFGKSVEIFKAEEYEDFVKKHYANNRSKRNKLLLEEIPEKMIDRQLNDTRHISKYISGVLSNIVRQEDGTDEGVNSKNIVPGNGKITTQLKQDWGLNDVWNELILPRFERMNQLTNSTDFTSWNKNHQKFLPTVPIEFSKGFSKKRIDHRHHAMDALVIACATKDHINLLNNQSAKSDTKRYDLKRKLMKFERVVYSHSKTGEKIEKEVPKQFLKPWDNFTVDAKNKMETIIVSFKQNLRVINKATNHYEKWIEKDGIKRKELIKQEGTNWAIRKPMHKETVSGKVDLPGIKIPKGKILTATRKSLDTSFDLKTINSITDTGIQKILKNYLEFKGSSELAFSPEGIEDMNKNIEKFNDGKPHQSINKVRIFELGSKFSVGQTGNKKDKYVEAAKGTNLFFAVYEDKNGKRSYETIPLNEVIERQKQGLDSVSFKNKEDFLLCPNDLVYVPSEDELENIYNIDFKNLTTEKTGNIYKVVSFSGNQIFFIRQDIAISIVNKAEFSTLNKMERAIDGSMIKENCIKLKIDRLGNIAKI

SEQ ID NO: 568 - protein, 1173 aa, Rhodospirillum rubrum
MRPIEPWILGLDIGTDSLGWAVFSCEEKGPPTAKELLGGGVRLFDSGRDAKDHTSRQAERGAFRRARRQTRTWPWRRDRLIALFQAAGLTPPAAETRQIALALRREAVSRPLAPDALWAALLHLAHHRGFRSNRIDKRERAAAKALAKAKPAKATAKATAPAKEADDEAGFWEGAEAALRQRMAASGAPTVGALLADDLDRGQPVRMRYNQSDRDGVVAPTRALIAEELAEIVARQSSAYPGLDWPAVTRLVLDQRPLRSKGAGPCAFLPGEDRALRALPTVQDFIIRQTLANLRLPSTSADEPRPLTDEEHAKALALLSTARFVEWPALRRALGLKRGVKFTAETERNGAKQAARGTAGNLTEAILAPLIPGWSGWDLDRKDRVFSDLWAARQDRSALLALIGDPRGPTRVTEDETAEAVADAIQIVLPTGRASLSAKAARAIAQAMAPGIGYDEAVTLALGLHHSHRPRQERLARLPYYAAALPDVGLDGDPVGPPPAEDDGAAAEAYYGRIGNISVHIALNETRKIVNALLHRHGPILRLVMVETTRELKAGADERKRMIAEQAERERENAEIDVELRKSDRWMANARERRQRVRLARRQNNLCPYTSTPIGHADLLGDAYDIDHVIPLARGGRDSLDNMVLCQSDANKTKGDKTPWEAFHDKPGWIAQRDDFLARLDPQTAKALAWRFADDAGERVARKSAEDEDQGFLPRQLTDTGYIARVALRYLSLVTNEPNAVVATNGRLTGLLRLAWDITPGPAPRDLLPTPRDALRDDTAARRFLDGLTPPPLAKAVEGAVQARLAALGRSRVADAGLADALGLTLASLGGGGKNRADHRHHFIDAAMIAVTTRGLINQINQASGAGRILDLRKWPRTNFEPPYPTFRAEVMKQWDHIHPSIRPAHRDGGSLHAATVFGVRNRPDARVLVQRKPVEKLFLDANAKPLPADKIAEIIDGFASPRMAKRFKALLARYQAAHPEVPPALAALAVARDPAFGPRGMTANTVIAGRSDGDGEDAGLITPFRANPKAAVRTMGNAVYEVWEIQVKGRPRWTHRVLTRFDRTQPAPPPPPENARLVMRLRRGDLVYWPLESGDRLFLVKKMAVDGRLALWPARLATGKATALYAQLSCPNINLNGDQGYCVQSAEGIRKEKIRTTSCTALGRLRLSKKAT

SEQ ID NO: 569 - protein, 1348 aa, Leptotrichia sp.
  source 1..1348: note = oral taxon 215
MKKFEDYYLGLDLGTSSIGWAVTNEKYDILRFNKKFMWGTHLFDMGNTASERRIFRTSRRRLKRKKNRIELLQTLFSAEMSKKDFGFFQRLKESQYFIEDKTFKNKNTLFMDENYTDQDYHMEYPTIYHLRKALIDNEESAFEIRKLYLAISHILSHRGHFLFEGELSDNLDFDDIFNEFVKYLNEELNIDFKIKSDVSLQAIKEILTDKMLNRTKKKEKLSELLEEEKNKIYQEIWKLLVGNEAKMSTIFDDKEYEEAKIAFSKGNYDEKEEEYESILGEKILFVQKAKAIYDWMLLQNILKEDKYLSYSKVKLYNEHKKDLKILKDVLKNLDKKIYKEIFSENGLYEEYLRIEKKKIGSKEEKTKDILYNRLKKIFENRDNMAIEDILNKIELDSFLPKQKIKDNGVIPRQVHQKELEIILKNAEKYFKWLIEKDETGLSVSEKIMKIFKFKIPYYVGPLNSKSPFAWIERKEYGKILPWNFENMVDMSKTAEKFIKRMTNKCTYLPEKDVIPKNSLLYTKYMVLNELNNLKIRGEKIKVELKQKIYTELFQKNKKIGMKTLIEFLKSQNIVVTKVEITGIDGTFNTSLGSYIDMKKIFGEEKIVKDSYKKMIEDIILWITLYGEEKKLIKSKIEEKYPEKVTPEEMKLILKLKYRDWSRLSKEFLTEIETMDEETGELISIIEMLWRKNENIMELLSYKYDFSNRIKEYNGINEKEKNITYEDLVKDLQISPSVKKMIWRALVIVKEIKKVTNKSPKKVFIEMARDTQTEKKRTEKRKDKLLELYKNIKNDDSIKELEKNLKDKTNDDLKSKKLYLYYLQLGRCMYSGEVIRLEDLMNDNLYDIDHIYPQSKIKDDSFDNTVLVKKQINADKTNEYPIDKSIQNKCKAFWTSLKERGLMSNTKYERLTRTEGFSDDELAGFISRQIVETRQATKVLADLLKVIFGSDTRIVYVKAGLTSDFRQKFGIYKFRELNDYHHAHDGYLNIVTGNIYNTLFTDNPYNFIKDRKKDNRTYNLNKVFERENDVWNPDVMLSKIERYIYKIRPLFTRASYEQKGGFSDQNISSEKDKLRPLKSSGVLSNIKYGGYDKIKNSYFFIVEYTEKKKRVRSIETLPIYIKKSISTKEDLEKYCKEELKLQEPKVLVSKLNYKSLIYSNGHEYYINSKTADSITIQNGIQIILTKENYETYRKIYKNLEYLKLIYKDEKIREEKILEKIPKILKNNKNDRDLSEDEISEKFWKLYKEIFEKIKIGIFSKFKSTLPIYIEDCKKLKDFTTLNNYAKSRFIQEILKCLNSQQGEFDTKYTHNYSKKYNTKLSKSKILENDFYIINQSPTGLFEKKVFLDK

SEQ ID NO: 570 - protein, 1345 aa, Streptococcus mutans; identical to SEQ ID NO: 159

SEQ ID NO: 571 - protein, 1128 aa, Roseburia intestinalis
MDEKMDYRIGLDIGIASVGWAVLQNNSDDEPVRIVDLGVRIFDTAEIPKTGESLAGPRRAARTTRRRLRRRKHRLDRIKWLFENQGLINIDDFLKRYNMAGLPDVYQLRYEALDRKLTDEELAQVLLHIAKHRGFRSTRKAETAAKENGAVLKATDENQKRMQEKGYRTVGEMIYLDEAFRIGCSWSEKGYILTPRNKAENYQHTMLRAMLVEEVKEIFSSQRRLGNKKATEELEEKYLEIMTSQRSFDLGPGMQPDGKPSPYAMEGFSDRVGKCTFLGDQGELRGAKGTYTAEYFVALQKINHTKLVNQDGETRNFTEEERRALTLLLFTQKEVKYAAVRKKLGLPEDILFYNLNYKKAATKEEQQKENQNTEKAKFIGMPYYHDYKKCLEERVKYLTENEVRDLFDEIGMILTCYKNDDSRTERLAKLGLVPIEMEGLLAYTPTKFQHLSMKAMRNIIPFLEKGMTYDKACEEAGYDFKADSKGTKQKLLTGENVNQTINEITNPVVKRSVSQTVKVINAIIRTYGSPQAINIELAREMSKTFEERRKIKGDMEKRQKNNEDVKKQIQELGKLSPTGQDILKYRLWQEQQGICMYSGKTIPLEELFKPGYDIDHILPYSITFDDSFRNKVLVTSQENRQKGNRTPYEYMGNDEQRWNEFETRVKTTIRDYKKQQKLLKKHFSEEERSEFKERNLTDTKYITTVIYNMIRQNLEMAPLNRPEKKKQVRAVNGAITAYLRKRWGLPQKNRETDTHHAMDAVVIACCTDGMIQKISRYTKVRERCYSKGTEFVDAETGEIFRPEDYSRAEWDEIFGVHIPKPWETFRAELDVRMGDDPKGFLDTHSDVALELDYPEYIYENLRPIFVSRMPNHKVTGAAHADTIRSPRHFKDEGIVLTKTALTDLKLDKDGEIDGYYNPQSDLLLYEALKKQLLLYGNDAKKAFAQDFHKPKADGTEGPVVRKVKIQKKQTMGVFVDSGNGIAENGGMVRIDVFRVNGKYYFVPVYTADVVKKVLPNRASTANKPYSEWRTMEDKDFLFSLYSRDLVHIKSKKGIPIKNVDGSLGESKEVYAYYIGADISGAKIEGKAHDSRYTFRGIGVQKLELIEKCQVDILGHISTVKNEKRMGFS

SEQ ID NO: 572 - protein, 1395 aa, Veillonella sp.
METQASNQLISSHLKGYPIKDYFVGLDIGTSSVGWAVTNKAYELLKFRSHKMWGSRLFDEGESAVARRGFRSMRRRLERRKLRLKLLEELFADAMAQVDPTFFMRLRESKYHYEDKTTGHSSKHILFIDKNYTDQDYYKEYPTIYHLRVALMKSGTDDIRKLFLAVHHILKYRGNFLYEGATFDSNASTLDDVLKQALENITFNCFDSSAAIGSIGQILMELGKTKSDKAKAIERLVDTYIITDEVDTSGKTQKEQVKEDKKRLKSFANLVLGLSASLTDLFGSVEDLDEDLKKLQIIGDTYDERRDDLAKVWGDEIHIIDDCKSVYDAIILMSIKEPGLTISESKVKAFKKHKDDLAILKSLLKSDRSIYNTMFKVDEKGLHNYVHYIKQGRTEETSCNREDFYKYTKKVVEGLPDSKDKEYILSEIELQTLLPLQRIKDNGVIPYQLHLEELKVILAKCGPKFPFLNEVADGFSVAEKLIKMLEFRIPYYVGPLNTHHNVDNGGFAWAVRKASGRVTPWNFDDKIDREKSAAAFIKNLTNKCTYLLGEDVLPKSSLLYSEFMLLNELNNVRIDGKPLEKAVKEHLIEAVFKQDHKKMTKNRIEQFLKDNNYIPEKHKPEITGLDGEIKNDLASYRDMVRILGNNFDLSMAEEIITDITIFGESKKMLRETLRNKFSSRLDDEAIKKLSKLRYRDWGRLSRKLLNVIEGCDKAGDGTPETIIILMRNFSYNLMELLGDKFSFMERIQEINAKLIEGQIVNPHDIIDDLALSPAVKRAVWQALRIVDEIVHIKKTLPARIFVEVTRSNKAEKKKKDSRQKRLSDLYAAIKKDDALLSGLTNEEFGGLKSGLAKYDDAALRSKKLYLYYTQMGRCAYTGEVIDLSQLNTDNYDIDHIYPRSLTKDDSFDNLVLCKRTANAQKSDTYPISKEIQKAQKAFWIFLKQQGLISERKYERLTRITPLTADDLSGFIARQLVETNQSVKAATTLLRRLYPGVDVVFVKAENVTDFRHDNDFIKVRSLNHHHHAKDAYLNIVVGNVYHERFTRNFRAFFKKNGANRTYNLAKMFNYDVKCTNAKDGKAWAVKTSMDTVKKMMDSNDVRVTKRVYEQKGQLSDINLTKASKVKADIYLPIKANDPIMSQNMKYGGYSDIKNAYYTIIEYSDKKNNSIKAFIPIPIFIATKTLTKQALLEYIKTVLPKANNLRIIYKKVYNDQLLKIDGFNYYLGGRSNDRFCIDNAIQLIVPLEIQFYIKLVEKFTAIISENKNIALKASSVKSRNPINNQVENITLEYTQKLFDYLVSKFNELIYLKMRGNKLTDVNNIGRKQFIKLSLEERCKALAELLNIFTNMNKKLSLSTINVSASRKVVNFKISSLDEFKIVNESITGLYSHEITIV

SEQ ID NO: 573 - protein, 1179 aa, Sphaerochaeta globosa
MSKKVSRRYEEQAQEICQRLGSRPYSIGLDLGVGSIGVAVAAYDPIKKQPSDLVFVSSRIFIPSTGAAERRQKRGQRNSLRHRANRLKFLWKLLAERNLMLSYSEQDVPDPARLRFEDAVVRANPYELRLKGLNEQLTLSELGYALYHIANHRGSSSVRTFLDEEKSSDDKKLEEQQAMTEQLAKEKGISTFIEVLTAFNTNGLIGYRNSESVKSKGVPVPTRDIISNEIDVLLQTQKQFYQEILSDEYCDRIVSAILFENEKIVPEAGCCPYFPDEKKLPRCHFLNEERRLWEAINNARIKMPMQEGAAKRYQSASFSDEQRHILFHIARSGTDITPKLVQKEFPALKTSIIVLQGKEKAIQKIAGFRFRRLEEKSFWKRLSEEQKDDFFSAWTNTPDDKRLSKYLMKHLLLTENEVVDALKTVSLIGDYGPIGKTATQLLMKHLEDGLTYTEALERGMETGEFQELSVWEQQSLLPYYGQILTGSTQALMGKYWHSAFKEKRDSEGFFKPNTNSDEEKYGRIANPVVHQTLNELRKLMNELITILGAKPQEITVELARELKVGAEKREDIIKQQTKQEKEAVLAYSKYCEPNNLDKRYIERFRLLEDQAFVCPYCLEHISVADIAAGRADVDHIFPRDDTADNSYGNKVVAHRQCNDIKGKRTPYAAFSNTSAWGPIMHYLDETPGMWRKRRKFETNEEEYAKYLQSKGFVSRFESDNSYIAKAAKEYLRCLFNPNNVTAVGSLKGMETSILRKAWNLQGIDDLLGSRHWSKDADTSPTMRKNRDDNRHHGLDAIVALYCSRSLVQMINTMSEQGKRAVEIEAMIPIPGYASEPNLSFEAQRELFRKKILEFMDLHAFVSMKTDNDANGALLKDTVYSILGADTQGEDLVFVVKKKIKDIGVKIGDYEEVASAIRGRITDKQPKWYPMEMKDKIEQLQSKNEAALQKYKESLVQAAAVLEESNRKLIESGKKPIQLSEKTISKKALELVGGYYYLISNNKRTKTFVVKEPSNEVKGFAFDTGSNLCLDFYHDAQGKLCGEIIRKIQAMNPSYKPAYMKQGYSLYVRLYQGDVCELRASDLTEAESNLAKTTHVRLPNAKPGRTFVIIITFTEMGSGYQIYFSNLAKSKKGQDTSFTLTTIKNYDVRKVQLSSAGLVRYVSPLLVDKIEKDEVALCGE

SEQ ID NO: 574 - protein, 1645 aa, Francisella philomiragia
MSIKILPIAIDLGAKNTGVFSAFYDKGLKLESLITKHGMVYELSKDSYTLLMTSRTAKRHQRRGLDRKQLVKRLFKLIWTEKLKLDWDKDTQQTVSFLLNRRGFSFLEEKHDASYFEKFPIEAIELLPQQLRLGIDSEENYDLNSKILETLENDTFKDVFEEIESNIKQAKKNIVKANVINIIKSAIDDKVRMGEIKPTKQNKFNDLKKVSLWIVEDIFDSTTSAYIERVDNYSKNIFNYLNSLSSDQLEILKTNLPIIDLNEHKNSVWNFNISNFNLDNEKLVEKLEVGDVSAHLHHLGYALQNIKKELDEGSRHRSKYFEEVASVLLEQNHKEGYLRNFCQNLHIGKYKNLNVKKLVNLIGNLSNLELKPLRKYFNDKAHAKADYWDEKRFAETYCRWILGEWRVGVKDKDKKDDAKYSYKDLCNELKLEVGTTQEVKANKSKGSVVEFLLELDPCRTIPPYQDNNNRKPPKCQSLILNPKYLDKKYPEWQDYLKQLKQLDSVQKYLEEFEQDLKGLKTSKDQPYFVGTKSENKQIASGQRDQKDLDARVLQFIFDRVKANDDLLLNEIYSQAKKAKQNASNESEIARAVQNLDKTLAKSKLPSALKTQHIKGIFEQGTLLHLVCKYFKARQRARDSRLYIMPEYRYDKNLDKYNNTGRFDDDNQLLTYCNHKPRQKRYQLLNDLAGVLQVSNGQLLSVEKWFRQAQPAETTKSQDEQIFEWLKAFKIASYCKAAVDVQKQYRGTLKNAVQTAIFKQRLETIKKNKKASQDEKALLEKYKNAKPLTADEKNLVKLVDNISKASQKIGENLGLDNKQVSKFNSIYSFAQIQQIAFAERNGNANTCAVCSADNAHRMQISNDSAKAQRLPAIPTRIVDGAVKKMATILARNIVDDNWDNIKKTLENKEELHIPIITESNAFEFEPNLAEIKGTKKKDRISSQELFAKKEERIKKASNEISAYSGASLGGETELDHIIPRSHKKYGTLNDEANLICVTRDDNQKRGNTPYYLSNLADKYKLKLFGTADNQEIEKYIADKIWDSERQDFKFGNYRSFINLSQEEQIAFRHALFLADENPIKQAVIKAIDNRNRAFVNGTQRYFAEVLANNIYLRAKKENLATNKLSFDYFGVETTNSNGRGIADIRKLYEAIDSDIEAYAKGDKPQDSYSHLIDAMIAFCVAADEHKNDGSIGLEIDETYSLYPLDENTGEVFKEDIFSQIKVADSEFRETKLARRKAYTVETNIRQEIQSKGDFKKSIPYKIHIDSLSAERFFPLLQISQDKWKYGFTLDNSVDIPKKDIELIQEFLTKSKEYKDYTVWIVNKTQAQEFLINIGYVGADKQQEKIAKLLDKLSYTTIKKEITSILAKANKTPDTVGDALDVIDELVFKTDKKNKLINFVKSEILLPVYNDWIMLKKAMQKADMNQNLHDFLSMYFITTNLKNKHQKVRKNFSLPVVSTIGTIRIRRKSWDGSNIYQVTGDESLAKYGFDGTVRPKTILSRNSVPIKYYNGKEKEVLIEPLSWIILDIDDLTDTSIIRAQIKNRSAGQVSIKVELSSLDNICLKEDSWSGNIIYAGDKDKPNTIKGDKFYIKKEDFYWLKDFSLMFDSGKTKASLSIDKIGNSYILEFVSSKGKKEKQWLKNETPNS

SEQ ID NO: 575 - protein, 1355 aa, Leuconostoc gelidum
MTYSIGLDIGTGSVGWAVIGDDYRLKRAKGKNLIGVRLFDSATTAAERRGYRTTRRRLSRRHWRLRLLNDIFASDLAEQDENFLPRLKYSWVNPDDEQNPQLNSDVANGALFGSSETDKAFHKNYPTIYHLRHELMTDTAKHDLREVYLAIHHIVKYRGNFLNTADKINAENSFNVDLFIAALDEYNEFLETPITSIKDAQLFSDKLTDINARNKSVRVENAMSETYDDKSKIFKAILTALVGNTANFQTIFDLSDLEKDEAKNFKFKLDLEDVETKLDVVRAKLSDEQNAFLEAVLIAYDGITLKMILGDYKSISQSMIESYKSHQRDWKYIKNNVRLNEQKIEPDKNSVKFFKLDPKKLIYPSNLAYLQVISSNEDEHRKGLDYFKTAIQDADILQRIENDTFLPRQRTKRNGVLPYQLHLAELEQIIKKQSKYYPFLANIYTQDNKTENKLIGLLKFRVPYYVGPLVEAEKVTGDGKNHWLIKKELQENTPITPFNFDDVVDKDKSGEQFIKRITGTDSYLIGEPTLPENSLLYQKYNVLQELNNVRNERHQRLPIKVKQDIFEHVFKIDKNVNAKKVMAYLKLNGYGDFQIAGLSDTRTGKFNSNLSSYNYFVDLLGREKTEKIREDRLEEIIEIQTVFEDKILVAKRLSNLDFLTPQEKSKLSAKHYTGWGRLSQKLLTTQFIKTALSEAGDIIPQSHSIIDLLYYTDKNLMEILNDKTFNVRNWLTEQNKGTESGNSLYDQIDALAGPKDIKRGITQVFSIIDDIKKAMGSNPETVYLEFARETQTSRLTNSRLNRVQEIYNSPELKTEFAYLAKKLEAETKESIHDDRLYLYYLQEGRDMYTGKEIPFDQISSNYDIDHIIPQAFTKDDSLDNRVLVNRATNARKSNSPTFTNDIIDNRKSWWQSLVKRGLMSKEKFERLTDKRKTFSENQTNHFIARQLVETRQIIKNVADLIKNNYDGTQAVAIRASLTGEMRRYLDWPKNRDMNDYHHAHDALMMATVGKYVDRRGFFDNGSVSDGAGNAYNLYTKDWLVAARVGTRNDSQRVNPYGFIVGSMNSKAVRQQVNKETGEIVWGNENLDYLRHVLSYKKILVTRRLSGSSGRLYAETLFSPNPKAKLIAQKANRSVALYGGFTKAESAYTALVEFNKKGDRSYKLIKVPMAIANRVNDKQITVTAYIASLNLRDFSRVVLEHLPLGTLIRESDGSEFYAASSEYKHNAKELWAPKEILRSSKKLDKATADNLIDIFDFLTNDKTISNFKFYEKDLLHLKNVRDKFVEASDEIKIKVLSDVIYELHNDAGWRDPFKHIQEKPAWTMLQVKGGIKLSEKAAIVYQSPTGLFETITIVGE

SEQ ID NO: 576 - protein, 1437 aa, Capnocytophaga sp.
MKYIKYILGLDIGSNSIGWALIQLDLLQKTKRIIATGSRIIPMDQKVLSDFGKGITISPTAQRTSYRNARHCRERHLLRRERLHRVLHILGFLPTHYDKQIDFSKRYGKFVDNTEPKIAYNERKFLFMDSFQEMLADFKIHQPDLFYTKKNGEESKIPYDWTIYYLRKKALSRKISKEELAWIILNFNQKRGYYQLREEEEENKENDFEIISSKIISVIKKDKDKKYNKYWYDIILENGLVYQAAFYNDFVYNWINQDREFIIERISLKNGTEKVKLSYLPTFDEIDKMDKKEQDKYYKKIKIKTENSIGNKTVGCYIYDHILQNPNEKIKGKLVRTIERKYYKEELKAILEKQVALQPELFTDQLFADCIRELYSKNEAQQRNLAARDFVHLFVEDIIFYQRSLRRQKSTLANCSLESRSYIDKDSHTRKEAPLKVCPKSNPYYQEFRVLQWLQNLKIYEIDTDQEVTHEFIKTLEDKQQFFDFLMNQKEIDCEELLKYFLNQTYPNAREKALKSELKKWKDTYRWNYVYDIGEKSSKKYPMNETRYELKRHLEKVANLPDDFLSSEVEYLLWHLIYSVKDKVAYEKGLKTFAQKHHLDKDSFVESFKKFKPYPSEYGSFSEKAIRKLLPLMRFGSYWDFNHIDKNTQKRIEDLITGVENEEIRTILREKAEKYQLEKETDFQDLPLWLAQYIVYNRHAEASSLEKWTSVNDLETYLNEFKQYSLRNPIVEQVVMETLRVVRDIWQQYGQGQASFFDEIHIELGRELKKTAKEREKLSKQNQKNEDINLSIKEKLKELEKYNTRAYSITHQEKYKLWLEQKHISPYTGQIISPENLFTDNYEIEHIIPQSRFFDDSLSNKVVCESIVNKAPYKDRQLGLEFIKNQGGRIVKELSTENKTIKIFTEEQYRTFIKEHYSNNPEKTKKLLLEEIPEKMVARQMNDTCYISKFISEILSKIVRSDEQDEGVHSKNVILCTGKITSALKQDWGVNDVWNDLILPRFERMNDLTQSTLFTTYNEKYQKYLPTVPMEYSNGFQKKRIDHRHHAMDAIIIACATREHINYINNQHALEKGKDKKEKQKEHDKLREKLCIKKDNKGSEENYSWIFKKPWDTFTQEVQAALEGIVVSFKQNLRVINKATNYYERWVEENGKYIKKMVKQEGTNWAIRKPLHEETISGKIYLDREEITKNDILTATRKTVDSSFDEKRIKKITDTGIQKILLNYLKYKGSPEIAFSPEGLEELNKNLSIYNDGKPHKPIYKVRIYEKGSGRFALGEKGRKYKKYVQGAPNLYFGIYQGANKRSFATIPLNEVIERQKQGRPSIPEYNEKGDPLLFSLSPNDLVYVPVEGEIIEDIDFQNLSKEQKERIYNVNDFSSTCYFTPNRIAKAIFPKEVDLQRKGDKLPGSYDTKTASLEGIQIKEVCIKLKIDRLGNISKA

SEQ ID NO: 577 - protein, 1535 aa, Flavobacterium columnare
MTKILGLDLGTNSIGWAIRDTENEGINQILDKGARIFSEGVKSENGKEISRAAERTAYRSARKIKYRRKLRKYETLKVLSINGMCPLSVEEVEQWKKSGFKEYPLNPEFLDWLRTNEDKNINPYLFRDKASKQKVTLFELGRALYHIAQRRGFLSNRLDQSAEGVFEEHNPQIQNLIEDLDSSNTILNELKEYYINLGIIDETEKSGFKKDLDEGEKKLKSLYNSLVAITKKNANDIETCKQELIARLNKKEDLGKVKGKIKDISQAMLDRNFKTLGQYFFSLYNKERIRNQYTSREEHYLEEFIIICQTQGIEGINTNEKLPEKKFTGLAKDLYRAIFFQRPLKSQKGLIGKCSFEKNKSRCAVSHPDYEEFRMWSYLNTIKIGTQSEKTLRFLTLEEKLKLVPKFYRKSDFNFEVLAKELVEKGASFGYYKSSKKNEFFYWFNYKPTDSVSACVVSASLENAIGKDWKIKTFEYQTRNTEKNEVTKSVDYKDLWHLLSVATSDTYLYDFAIEKLKLEPKNAKAFSKTKLKKDFASLSLAAIAKILPYLKQGLLYSHAVFMANIENIVDADIWKDEEQQKFIQSKIVELVDNYIVEKSKLELINGLLKIYNTEDKEGRKVYYSKEAESLFEADLRKKLVPFYKANIIIEEHEQEIIFQDLFPILMDQLKKQEFIKIGRLDKQIEAFLEGENEEGQIFCNHTDKLKKLYHPSDIEVFKKKTIKDEWGNEKVVLGSPLTTSIKNPMAMRALHQLRKVLNTLIANDQIDEDTRIHIEMARELNDANKRKGIQDFQNENKKFREEAIKEIKKLYLEECHKDVNPTEDDILRYQLWLEQGKCEIYEEGNNISICDIIGSNPSYDIEHTIPRSISQDNSQMNKTLCSLKFNRSIKKQKMPVELSNYNDILPRIAHWKKEAEELTRQIETISRSIKSAATKVAKDKNIRKRHYLTLKRDYILGKYERFTWEEPKVGFKNSQIPDTGIITKYAQAYLKSYFKRVESVKGGAVAEFRKLWGIQESFIDENWWKHYKDKDRDKHTHHTIDAITIACMPKDKYDLLAHAWRLEDEQDKKAAKVLIEQAKPWKTFKEDIEKIETEILVSHFTPDNVKKQSKSIIKNRGKKVYVLKNELPVNFKNKIEGKDYFKLKFDSKILYKIPKKKEKQTDTFYEELPKNYLNGVEGKDYFKINTTGKTFYKIPIFNQGDTIRGSLHQETTYGAIKLPDIDIETKKPLHTDKGGFILKKDIKGNEIVFFVVRKEISKISENDVQNIVDNVVRKKIENAIANSLITFKIVKKKKVAVIKEGVTIWMREPNIEKGIEGIPIKKVRIITNSVKNPIEIKVHSPLSKSRHKHKQKVYGQNDENYAMALYELDGKREFELINNFNLAKLLKQSQSYYPLHKEKEIKGKKILVPIEKRNNKDVILKRGQQVVFYDKTVENPKDISEIIDFRERIYIIEGLTIQRQKDKKTSKVNEYGIIQLRHFKEARKSEEISKDNFKPDGEFKINENKPTRKMNHNQFTAFVEGIDFKVLPSGKFQKI

SEQ ID NO: 578 - protein, 1364 aa, Peptoniphilus duerdenii
MKNLKEYYIGLDIGTASVGWAVTDESYNIPKFNGKKMWGVRLFDDAKTAEERRTQRGSRRRLNRRKERINLLQDLFATEISKVDPNFFLRLDNSDLYREDKDEKLKSKYTLFNDKDFKDRDYHKKYPTIHHLIMDLIEDEGKKDIRLLYLACHYLLKNRGHFIFEGQKFDTKNSFDKSINDLKIHLRDEYNIDLEFNNEDLIEIITDTTLNKTNKKKELKNIVGDTKFLKAISAIMIGSSQKLVDLFEDGEFEETTVKSVDFSTTAFDDKYSEYEEALGDTISLLNILKSIYDSSILENLLKDADKSKDGNKYISKAFVKKFNKHGKDLKTLKRIIKKYLPSEYANIFRNKSINDNYVAYTKSNITSNKRTKASKFTKQEDFYKFIKKHLDTIKETKLNSSENEDLKLIDEMLTDIEFKTFIPKLKSSDNGVIPYQLKLMELKKILDNQSKYYDFLNESDEYGTVKDKVESIMEFRIPYYVGPLNPDSKYAWIKRENTKITPWNFKDIVDLDSSREEFIDRLIGRCTYLKEEKVLPKASLIYNEFMVLNELNNLKLNEFLITEEMKKAIFEELFKTKKKVTLKAVSNLLKKEFNLTGDILLSGTDGDFKQGLNSYIDFKNIIGDKVDRDDYRIKIEEIIKLIVLYEDDKTYLKKKIKSAYKNDFTDDEIKKIAALNYKDWGRLSKRFLTGIEGVDKTTGEKGSIIYFMREYNLNLMELMSGHYTFTEEVEKLNPVENRELCYEMVDELYLSPSVKRMLWQSLRVVDEIKRIIGKDPKKIFIEMARAKEAKNSRKESRKNKLLEFYKFGKKAFINEIGEERYNYLLNEINSEEESKFRWDNLYLYYTQLGRCMYSLEPIDLADLKSNNIYDQDHIYPKSKIYDDSLENRVLVKKNLNHEKGNQYPIPEKVLNKNAYGFWKILFDKGLIGQKKYTRLTRRTPFEERELAEFIERQIVETRQATKETANLLKNICQDSEIVYSKAENASRFRQEFDIIKCRTVNDLHHMHDAYLNIVVGNVYNTKFTKNPLNFIKDKDNVRSYNLENMFKYDVVRGSYTAWIADDSEGNVKAATIKKVKRELEGKNYRFTRMSYIGTGGLYDQNLMRKGKGQIPQKENTNKSNIEKYGGYNKASSAYFALIESDGKAGRERTLETIPIMVYNQEKYGNTEAVDKYLKDNLELQDPKILKDKIKINSLIKLDGFLYNIKGKTGDSLSIAGSVQLIVNKEEQKLIKKMDKFLVKKKDNKDIKVTSFDNIKEEELIKLYKTLSDKLNNGIYSNKRNNQAKNISEALDKFKEISIEEKIDVLNQIILLFQSYNNGCNLKSIGLSAKTGVVFIPKKLNYKECKLINQSITGLFENEVDLLNL

SEQ ID NO: 579 - protein, 1368 aa, Firmicutes bacterium
  source 1..1368: note = Firmicutes bacterium M10-2
MKYESEEYYIGLDMGTSSVGWAVTDPHYHLIRKKGKDLWGARLFEKANTAQERRTNRINRRRNQRRKQRIAFIREAFRKEVEKVDVNFFRRLDESQLYLEDKSIKEPYLLFNDLNYTDKDFYHQYPTVFHLITDLLTSDRKFDIREIYIAVSSLYNHRGNFLNKSLGNETQDEDLVFKNLDEAFSACGMNWNTKAENIEVVKQILCDRSLNKKEKQDQLAHCLEINKKTEKEKIEFLKLLTGGKADSKKMFPQYHYERDEKLSFAFADENGDENWEETLNAIEERLTSDEYGLILALKSVYDWSILADLMKNEKTGETYPYLSMARKDSYEKHKADLRLLKSVIKRLIPNEYNHFFRQYDGKGKTYTNYIGSVQYHEKRHRFKHITTKEFYDGLKKLLKPYSEDEEIKQILQDIESETFLPKQITNMNGVIPNQVHAKELKVILEKASQHYDFLNETNESGLTVKEQIMQMFTFQIPYYVGPLANLNGKGNGWAVRYVGKERTKVYPWNMDEVIDEKETADQFIKRMISTCTYLGDEYVLPKSSILYEKFAVLNELNSLKINGQPVSVDLKQKIYRDLFTKGKRVTQKGLLLYLKREGVISKSEETILSGFDIDFKNTLSSYRKFCEVFATNELNDEQIRMAEDIIEWLTVFGDSKKFVREKIHGNYPQITANQLKRILSFNFKDWGKLSKQFLELEGEDRETGKSCSLIQALWDTNNNLNQLLSSRFTYKENLEKKRKKIEMDLFEFTHEDLDDLYISAPVKRMIWQALKIMKDIVIVMKESPTKLFIEMTRNNENEKTRTVSRKNKLVDLYKKIKGESRDWIKELERYEEKDFRSKKLYLYYTQMGKSAYSGEPIDMDKLFDKNVYDIDHIYPKSKVKDDSLLNNCVLVKRKENMDKGNNFPIDPDIQTKQEHLWKFWLEKGLITQEKFNRLTRKKPFTNDELADFVNRQLVETGQATKTIADLFKMTFPNSDIVYVKAGNVTDFRQYIEVYKCREVNNLHHAYDAYLNVVVGNVYDTKFTKNPMNYIKEQRKENSNERYHMDKIFEFPVIRNGKEAWITKKDESINIVRKTLARKTPLVTKRNFEANGTIAKATIYPKGNVKDQGYLPRKTSIPALRDMKKYGGVTSIQIAYFFLVEHEVKKKRIRTIECVPIYRKEELKTKEQLERYCREELKLINPSIRLEKIKPYSLLKMNGNFFYITGKTNDRFSLANAMELYVDKVSENHIRDLVKYKNCGYFNVDDKEARKRNERLYTILTKKHLTVFKGSPKPMGEKLQQYQQLFLELEVSKQVYVLLQILQLTATNVKTKADLTAIGGKANEGTMDISKNLENVIKNQIKKGLVPELMLINQSPTGLFESEIDLLTI

SEQ ID NO: 580 - protein, 1068 aa, Sedimenticola thiotaurini
MPKSAKPQQAYTLGLDIGIASVGAALLGQQHIIGLHVRTFDRAETAKEGEPLNKIRRDARLTRRRLQRRAHRLLRLRRLFKRHNLIPDTDTSTFISGQSPWELRAQGLDRQLTSAEWTTVLYHIVKHRGFHSNRKSEVKTDEKAGQMLSGVNQNQALLKQSGLRTMGELAARHEAFREAKRNKKGAYNHTFSRHDLEDELHLLFSRQRELGNPYATPELEDAVHTLLMQRRPALSGTNLLKMVGHCTLEPDEFRAPKASYTAERFIWLTKLNNLRVSGSGETRPLNESERQALLSKPFSQSKLTYKQVRKILELPDNIRFVGLHYHPAQDNGKSPENRVFFEAKAFHALRNVYKKAGLNLEWQRDSQNPEKLDNITYALTVFKEDKEAKQWLIEKGVEASVIEAVLNESFSEFVRLSIKALRKIIPHMEIGHRYDEAVKLAGYSHHSHLPQPSKTPYIPRFSKQSIANPVVSRALNQARKLVNAIVREYGPPDAVHIELARDLNKPFDERRKIEKDQEKYQKDKARDIETFQENFGFTPKGLQLTKWRLYREQSGKCAYSLKPLDINRLFEDGYVEIDHALPYSRSFNDGMNNKVLTLTTENRNKGNQTPYEYLDGASNSAQWRNFVAWVNSNKSYRASKQRNLLRKDFAAQAATEFRERHLTDTRYIAREFKRMVETHLKLNKPNQRCVVVSGQLTAYLRARWGLIKVRENGDLHHALDAAVVAACSHAMVKRLADYSRRGELQYARGHHFDPETGEIIDINALRKLDDHFPQPWTDFRRELLAWLSPDPAQQLKNLAYYTDERLKQVKPIRVSRAPTRRGLGAAHQETIRSAKYLGENRSTVKTPLEKLKLKDIPNIVGYEDPRNHQLIQAISQRLTEHGDDGKKAFKEPLYKPGNNKSTAPVVRSVKLFTVQKSGIPVRGGIANNGNMVRVDIFTKKERYFAVPVYVSDAARNELPNKAVARGKDGWIDIDDSFSFLFSLYPNDWVSVVVKPHEAPCEGYYAGLDISTGAIHIWAHDRNRSVGKNGLMRSIGIKTAHSVEKYHVDLLGNLYRVVHETRKPLRAGK

SEQ ID NO: 581 - protein, 1494 aa, Prevotella pleuritidis
MKNILGLDLGTNSIGWALIDNESHRIIKSGSRIIPMDAATMGDYEKGNLKSADWKRTSFRGMRRLYERAKLRRERLLRVLNILGFLPEEFRRQIDFEHHPGQFIDGKEPLIAYHHDENGQRVFSYMSAFEEMLTDFRATQSELVRDGRRVPYDWTIYYLRHKALTQPVTKEELAWIILNFNTKRGYYQLRSESEEVTTNKNEEYAELKVVSVEKTGEDKKRAGYYWYTITYDNEAEQKITSTIPPRQIGDKVELIVTTARDKAGEIKKSVRSPKEDDWTLMKKRTEHNIEEEECTVGSYIYQHILADPTVKVRGKLVHTIERKFYKKELKQILNKQKEFIPELQDASLYEACIKELYRNNEAHIQSIANKDFTDLFVNDIIFYQRPLKSKKSTISNCPYESYYYKNKETGELIRKPIKCIAKSNPLYQEFRLWQFVHNLRIYKKSEEVSGRLQTDVDVTDRFLTTPDDYAKLFSWLNDRKEIKQKELLRYEAFGLSKSYGDYRWNFVEDKPYPCNETLHEINRRMKSILSDKKLSSEAYQQLWHILYSIDDPIEIRKALTSFAQNQEINSDDFVNAFYQYVPEKTKSYGAYSEKAIKKLLPLMRRGSYWAIGNIDEKTHRRLDNIINGVADDSISTCTREKLNNLTDITMCQGMPLWQACYAVYDRHSEAADTTKWEQPDDIDTYLSTELKQHSLRNPIVETVISETLRVVRDIWKAYGRPEEIHVELGRNLKQDAKSRKQDAIRMAENEQTNLRIRALLQELSNPECGVENVRPHSPSQMELLKIYENEVLQSTDDIPEEISNIIKDLGKTDSKKRPSLSDITKYRLWLEQKYQSPYTGHIIPLSKLFTPAYQIEHVIPQSRYFDDSISNKVICEAEVNKEKDRMLGYEFIINKGGSIVKGSFGQQFKIFDKVQYEDFVKQRYAHNKTKMKKLLMDDIPDGFIQRQLNDSRYMSKKIISILSNIVREDGEKEATSKHIIVTSGAITDRLKKEWGIKDVWNDIIAPRFKRLNKLTDSNNYGMETEKEGRQYFQINVPTELSTGLIKKRIDHRHHAMDAIIIACTTRNHVNFLNNSTAASDQKDIRRDLQHTLCTKTKTDSNGNYVWRFNKPWDTFTQDTRQELEGIIVSFKQNLRIINKMSNYYQHYVDGRKTISRQNKGDGWAIRKSLHKATVSGKVNLKRSKTVGFKEALNDWSAIKDKTSKAILQKIIAQYKNYDPKTIFKYFKDRNFKVEGKDFSKLEVYYNTSDKEPMSAHRVNIDTTFDEKEIRSITDTGIQKIMLKHLHTYDDAQGKTHPEAAFSPEGIEKMNQNIRMLNGGKDHKPIFKVRKAEILGMKFAVGERGHKDKKWVEADKGTNLFFAIYESEENKRSYSSIPLNEAIDRLKRGENIADERDQNGNKLLFVLSPMDLVYVPDPDDAHIDEVKGNNNIFKMVSCTGTECYFVPETYANVICKGKELESKNKVESYDGINIKKSCYKITVDRLGKVRKIFKG

SEQ ID NO: 582 - protein, 1398 aa, Veillonella parvula; identical to SEQ ID NO: 167

SEQ ID NO: 583 - protein, 1101 aa, Akkermansia muciniphila
MSRSLTFSFDIGYASIGWAVIASASHDDADPSVCGCGTVLFPKDDCQAFKRREYRRLRRNIRSRRVRIERIGRLLVQAQIITPEMKETSGHPAPFYLASEALKGHRTLAPIELWHVLRWYAHNRGYDNNASWSNSLSEDGGNGEDTERVKHAQDLMDKHGTATMAETICRELKLEEGKADAPMEVSTPAYKNLNTAFPRLIVEKEVRRILELSAPLIPGLTAEIIELIAQHHPLTTEQRGVLLQHGIKLARRYRGSLLFGQLIPRFDNRIISRCPVTWAQVYEAELKKGNSEQSARERAEKLSKVPTANCPEFYEYRMARILCNIRADGEPLSAEIRRELMNQARQEGKLTKASLEKAISSRLGKETETNVSNYFTLHPDSEEALYLNPAVEVLQRSGIGQILSPSVYRIAANRLRRGKSVTPNYLLNLLKSRGESGEALEKKIEKESKKKEADYADTPLKPKYATGRAPYARTVLKKVVEEILDGEDPTRPARGEAHPDGELKAHDGCLYCLLDTDSSVNQHQKERRLDTMTNNHLVRHRMLILDRLLKDLIQDFADGQKDRISRVCVEVGKELTTFSAMDSKKIQRELTLRQKSHTDAVNRLKRKLPGKALSANLIRKCRIAMDMNWTCPFTGATYGDHELENLELEHIVPHSFRQSNALSSLVLTWPGVNRMKGQRTGYDFVEQEQENPVPDKPNLHICSLNNYRELVEKLDDKKGHEDDRRRKKKRKALLMVRGLSHKHQSQNHEAMKEIGMTEGMMTQSSHLMKLACKSIKTSLPDAHIDMIPGAVTAEVRKAWDVFGVFKELCPEAADPDSGKILKENLRSLTHLHHALDACVLGLIPYIIPAHHNGLLRRVLAMRRIPEKLIPQVRPVANQRHYVLNDDGRMMLRDLSASLKENIREQLMEQRVIQHVPADMGGALLKETMQRVLSVDGSGEDAMVSLSKKKDGKKEKNQVKASKLVGVFPEGPSKLKALKAAIEIDGNYGVALDPKPVVIRHIKVFKRIMALKEQNGGKPVRILKKGMLIHLTSSKDPKHAGVWRIESIQDSKGGVKLDLQRAHCAVPKNKTHECNWREVDLISLLKKYQMKRYPTSYTGTPR

SEQ ID NO: 584 - protein, 1426 aa, Niabella soli
MPRKNILGLDLGTTSIGFAKIIEDDDYQCSSVELIGVRVNPLTTDEQTNFEKGKPVSVNADRTLKRGMRRNLDRYQLRRDYLIEILRTHHIITADTKLAEDGKNTTHTTYALRALAATAEIPLEAFVRVLLAINKKRGYKSSRKAKNEDEGQLIDGMAIARRLYEESLTPGQFSYQLLKEGKKYLPDFYRSDLNTELNKVWNFQKQFYPEILTDEFKRHLEGKGQRATAVAFWGQHGFSMAENKGSREEKKLHAYKWRSEAAHKQLTKEEVAFVITEINNDLNKSSGYLGAISDRSKELFFNKQTVGQYLHQQLKENPHTRLKGQVFYRQDYLDEFETIWEMQAKFYSALTLELKEEVRDVVIFYQRKLKSQMGLISLCEFESKEIEIEKNGEKAKKRIGLRVAPKSSPLFQEFKIWQVLNNLEFRNKKTKEVFVPEMAAKQQLFDELNIKGNLLASEAIKILGYKTKDWEANYHTLEGNRTNKSLYDAWLKILELEGYDENLLKLSGSDDIDVSKIEKPALEIRQMVLAVFEVLGISGAILDFDAEADGKAFEQQPAYQLWHLLYSAEDDGKKYSQEDIFTYGHDNIGLKKKLCEKFGFRPEHTKILVNVVFSDDYGNLSSKAMRRIYPFIKELTYDKACAEAGYRHSAASLTKEEIAARPLQNRLDLLKKNELRSPVVEKILNQMVNVVNTLVDDENQNRKARGLSEDFHFDEIRIELARELKKNAKERAEMTTNINTAKQSHEKIIRILQTEFGVPNPSRNDIVRYKLYEELKNNGYKDLYTNTYISRDILFSKQIDVDHIIPQMSLFDDSFSNKTVVFRKDNQDKGNKTAYDYILGKYGEQALEEYISRITSLFELGKKNKEEGIGKAKFQKLQKRLVDIGDGFIERDLRESQYIAKKANNMLYAICRSVVSTSGEITARLREDWDLVNVMQEINLPKFRALGLTEMVEKKDGAQKERITDWTKRNDHRHHAMDALAIAFTRHSHIQYLNHLNARKDEANKWHPVVSKIEEKETVLIYDDLGNRKRKFKAPMPNFREVVKEHLENVLISHKAKNKVVTKNKNKIKTVRGEKVKTELTPRGQLHKETIYGRYRYYESKEEKIGPKFDAEMIGMVTNPQYKKLLLERLAANGNDPKKAFWGKNALNKNPLYVDEARQELLPEKILLRWLNDDYSIRKDVTPENLKDIKTIEKILDKGVKKILLKRLADFGNDPKKAFSDLDKNPIWQNEAKRIAIKRVTISGIKNAAPLHHKKDHLGNDILDEKGKQIPSSFVSTGNNHHVAIYRDAEGNLQERVVSLFDAVQLVNGGEPVIDKEYNKGIGWQFLFTMKQNEMFVFPDEKTGFNPREVDLLSSGNRKLISPNLFRVQKLASKNYFFRHHLETSVEEKKELKNIAYKPQLGLNALSNIVKVRINHIGEIVSVGEY

SEQ ID NO: 585 - protein, 1379 aa, Coprobacter secundus
MKQILGLDLGTTSIGWALVREAENKDEQSSIVRIGVRVNPLTSDEQKNFEQGKSITTNADRTLKRSMRRNLQRYKLRRDHLKDCLQKNGIITDKAVLSENGNYTTFQTYYLRAKAVNEKISLEEFARVLLMLNKKRGYKSSRKMKSADEGQLIDGMSVAKRLYNDNITPGQYVLSLLEEGRKYIPDFYRSDLLDELDKIWTFQQCFYPEILTPECRKLIAGKGKQATAKIFLGKYKIYTADNKSKDKRLQAYQWRVEALSGQLPIEVVAFVVCEINGAIQASSGYLGAISDRSKELYFEGLTVGQYLVKQLEKNPDTSLKNKVFYRQDYLNEFEKIWEKQAEYHTELTPQLKKEVRDIIIFYQRTLKSQKGLVGFCEFESRQIEVMIDGKLKKKTVGCRVCPKSSPLFQEYKIWHNLNNLKIVEKELGKSRFLNQDEKESLFQELNIKEKLSKTDILKLLCLKAKEFDLNFEKVEGNRTQAELFRAYQAIIEMSGNGDYDFSKMTSSEIQDTVTGVFRGLGYNTDILSFDAEKEEKTFDKQPMYLLWHLLYSYEGDSSDTGNKALITKIKKLCGFESEEYARILTDVTFQSEYGNLSTKAIRRILPFMKKGSEYSEACRHAGYRHSERSLTKEELDKKVYKDHLELLPRNSLRNPVVEKILNQMIHVVNTVVDTYGKPDEIRIELARELKKSAKERDEMTASINKTAAEHKKYCEVLQKEFGFTHVSRNDIIRYKLYLELENNGYKTLYSDTYIPREKLFSKEFDIEHIIPQSKLFDDSFSNKTLECRSVNIEKSNDTAYDYVLNKYGEQGILDYKNRIENLYKDSKISRTKYQKLMMKNSDISGNFIERELRDSQYIAKKAREILEELVKFVVPTTGSVTARLREDWQLVDVMQELNWKKYDKLGLTDVRYDKDGREIRYIKDWSKRNDHRHHAMDALTIAFTKRSIIQYLNNLNAKSDKSGSIYAIEQKELFRDKRGKLKFIPPMPCNIFRAEAKRHLENVLVSVKAKNKVVTPNINRSKGKNGINKKIQLTPRGQLHNETIYGSMKRYETKWEKIGSGFDERQIAKVANKKFREALLSRLAEFGNDPQKAFTGKNSLEKNPLYVDELHTQKVPEKVKIVTLENLYTIRKEITPDLKIDKVVDAGVRRVLQERLDEFDDDSKKAFSNLDENPIWLNGKKMKRVTIMGVSNAVPLHDKKDYKGNLVFDSKGRKQPVDFVNTGSNHHVAIYRDESGELQDIVVSFYEATTRSTLGIPVIDKEYKKAEGWNFLFSMKQNEYFVFPNEETGFNPKEIDLMNPDNYTTISPNLYRVQKFSKCMYGNSSVREYVFRHHLETSVNDSKGLKNIAYKNVKSLVYLEGIVKVRINHIGQIVSVGEY

SEQ ID NO: 586 - protein, 1338 aa, Streptococcus macacae
MTKPYSIGLDIGTNSVGWAVVTDGYKVPAKKMKVLGNTDKSHIKKNLLGALLFDSGNTAKDRRLKRTARRRYTRRRNRILYLQEIFAEEMAKADESFFQRLNESFLTNDDKEFDSHPIFGNKAEEEAHHHKFPTIFHLRKHLADSTEKSDLRLIYLALAHMIKFRGHFLIEGQLKAENTNVQTLFDDFVEVYDKTVEESHLSEISVSSILTEKISKSRRLENLIKYYPTEKKNTLFGNLIALSLGLQPNFKTNFKLSEDAKLQFSKDTYEEDLGELLGKIGDNYADLFISAKNLYDAILLSGILTIDDNTTKAPLSASMIKRYEEHQEDLAQLKKFIRQNLPDQYSEVFSDKTKDGYAGYIDGKTNQEAFYKYIKNMLSKTEGADYFLDKIDREDFLRKQRTFDNGSVPHQIHLQEMHAILRRQGEYYPFLKENQDKIEKILTFRIPYYVGPLARKGSRFAWAEYKADKKVTPWNFDDILDKEKSAEEFITRMTLNDLYLPEEKVLPKHSLVYETFNVYNELTKVKYVNEQGKAIFFDANMKQEIFDHVFKENRKVTKDKLLNYLNKEFEEFRIVNLTGLDKENKAFNSSLGTYHDLRKILDKSFLDDKVNEKIIEDIIQTLTLFEDREMIRQRLQKYSDIFTTQQLKKLERRHYTGWGRLSAKLINGIRDKQSNKTILGYLIDDGYSNRNFMQLINDDSLPFKEEIARAQVIGETDDLNQLVSDIAGSPAIKKGILQSLKIVDELVKVMGHNPANIVIEMARENQTTAKGRRSSQQRYKRLEEAIKNLDHDLNHKILKEHPTDNQALQNDRLFLYYLQNGRDMYTEDPLDINRLSDYDIDHIIPQSFIKDDSIDNKVLVSSAKNRGKSDNVPSEDVVNRMRPFWNKLLSCGLISQRKYSNLTKKELKPDDKAGFIKRQLVETRQITKHVAQILDARFNTKRDENKKVIRDVKIITLKSNLVSQFRKDFKFYKVREINDYHHAHDAYLNAVIGKALLDVYPQLEPEFVYGEYPHFHGYKENKATAKKFFYSNIMNFFKKDDIRTDENGEIVWKKDEHISNIKRVLSYPQVNIVKKVEIQTVGQNGGLFDDNPKSPLEVTPSKLVPLKKELNPKKYGGYQKPTTAYPVLLITDTKQLIPISVMNKKQFEQNPVKFLRDRGYQQVGKNDFIKLPKYTLVDIGDGIKRLWASSKEIHKGNQLVVSKKSQILLYHAHHLDSDLSNDYLQNHNQQFDVLFNEIISFSKKCKLGKEHIQKIENVYSNKKNSASIEELAESFIKLLGFTQLGATSPFNFLGVKLNQKQYKGKKDYILPCTEGTLIRQSITGLYETRVDLSKIGED

SEQ ID NO: 587 - protein, 1049 aa, unidentified
  source 1..1049: note = Mannheimia
MQLSKLNYILGLDLGIASVGWSVIEIDETEMPIRLIDVGVRTFERAEVPKTGESLALARRLARSTRRLIRRRAFRLLKAKRLLKNHQIVSADELSTLPNHCWELRVKGLDERLTCQEWAAVLLHLLKHRGYLSQRKSEAQNADKEMGALLSGVANNHKLLSENHYRTPAEIAVKKFALEEGHMRNQRGAYTHTFNRLDLLAEMRLLFQTQRELGSPYASGELEQEFCKLLMWQKPALSGDAILKMLGKCTLEPTEYKAAKNTYTAERFVWLTKLNNLRILENGSERALNADERALLLNQPYEKAKFTYEQARKLLQLNEAARFNSVRYGKENAEKSTLMEMKAYHAIRKAVETADSSAWATLKTQPLLLDEIGTAFSIYKTDEDIKTQLQGKLADNVIDVLLENLNFDKFIQLSLKALYKILPLMEQGLRYDEACSQIYGDHFGKKEQKNDRLLPQIPADEIRNPVVLRTLSQARKVINAVIRLYGSPARIHIETARELGKSYKDRKEIEKRQEQNRAEREKAVDKFKELFPNFIGEPKAKDILTMRLYEQQNGQCLYSGKSLDLHRLLEKGYVEIDHALPFSRTWDDSFNNKVLVLAGENQNKSNQTPFEWLGKDEQKWALFTARVNSCRFPYSKKQRILTKKLDDEGFIQRNLNDTRYIARFLVNFVNDNLHLTGKGKRRVFASNGQITAFLRGRWGLTKVREESDRHHALDAVVVACSTVSIQQKITRFVKYQEGNLQTAERIDRETGEIIPLHFPDPWAFFREEVMIRIFSEMPQEDLVIKLPDRPQANHEFVQPLFVSRMPTRKMSGQGHMETIKSAKRLDEGISVSKVPLTQLKLKDLENMVNRDREIALYEALKARLTEFKDDPAKAFAEPFYKKGGVQVKSVRVEQVQKSGVVVRNGNGVADNASMVRVDVFIKGGKYFLVPIYTWQVAKGILPDRAVIAYTPENEWELMDDSAQFQFSIYPNDLIKLTTKKAIFFGYYSGFNRLTGAINIKEHDLQISKGDKGVHLGLGVKLALSLEKYQVDELGKNIRPCRPTQRQNVR

SEQ ID NO: 588 - protein, 1429 aa, Parabacteroides johnsonii
MKKILGLDLGTSSIGWALVNEAENSDEVSSIIKLGVRVNPLTVDEMQNFEKGKSITTNADRTLKRSMRRNLQRYKLRRDALIELLKKVGFITDKTILSEQGNRTTFETYRLRAKAAEEEISLKELARVLLMINKKRGYKSSRKAKGEEEGALIDGMEIAKKLYDEDLTPGQLCLQLLESGKKFFPDFYRSDLQEEFNKIWDFQKQFNLFSFCDVAKEEVKGKNKSQTWAILAKYFVETKKVNVWNEHEAQTENREEVYKLVGLKRTVKGEELKKENYRWRVQALTEQLDLEKIAVVLQEINGQISASSGYLGAISDRSKVLYFNRQTVGQYQMAELNKNPNMSLRNMVFYRQDYLDEFNVIWEKQAEFHKELTPELKKEIRDIIIFYQRRLKSQKGLISFCEFENREVVVEKEGKKQTKIIGCKVIPRSHPLFQEFKIWQTLNNIEVFVGEKKGKRKKSNVSSDLFGDTEDALITEGRRFLYQEEKKILAKELSIKKGLTKAEILRLLFENPQELDINFKQIDGNQTGFALFSAYSNMIEKYGYEPLDFKKPAEDLISQLKTVFTDLGWNTDLLFIDLDKENKEWEKQPYFRLWHLLYSFEGDNTPTGNGKLIEKIMQLCGIEKEYAIELANVSLQDDYGSLSAKAIKKILLYLKEGNQYDMACEYAGYRHSKSSLTKEEIENKVLKDKLEILPKNSLRNPVVEKILNQMVNVINTVMEVYGRPDEIRVELARELKKSAKEREELTKAVAKNTREHEEIRKVLQSEFGMINVSRNDIIRYKLYEELKDNGYKTLYSNQYIPREKLFSKEIDIEHIIPQSRLFDDSLSNKTLEYKSINIEKGNKTAYDFVKEKYGEEGLQQYLNRCENLCKDKKAKLRKLKMELNEIPDGFIDRDLRNTQYIAKKALSMLTEICRRVVATTGSITDKLREDWQLVDVMKELNLPKYEALGLVEVYEDKDGRKIKRIKDWTKRNDHRHHAMDALTVAFTKDVFIQYFNNKNAAWESDSKEHTNIVGIKTRYFESGKAVPPIPLGQFRVEAKCHLENLLVSIKAKNKVVTTNVNCIKKKGGTYKNTQQTPRGQLHLETIYGSHNQYVTKIEKVNASFDAVKIATVSKQDYRNALLKRLEVFGNDPKKAFTGKNSLEKNPIYLDRAQTIQVPDKVQTVELETAYTIRKPVDPTLNVDKVVDKKIRLILEQRLKEYGGDAKKAFVNLDENPIWLNEEKGISIKRVTIRGISKAQALHDKKDKDGNFILDETGKRIPVDFVNTGNNHHVAIYRKPVLDKKGQVIFDDEGNPMYELDEDVVPFFEAVTRANLGIPIIDKDYKKSEGWQFLFSMKQNEYFVFPNEKTGFNPKEVDLLDPDNYAMISPNLFRVQKIGLNDYTFRHHLETTIQNDLKFITWIRCGKSGIKDIVKVRINHIGQIVSVGEY

SEQ ID NO: 589 - protein, 1127 aa, Streptococcus sp.
MNGLVLGLDIGIASVGVGILEKDSGKIIHANSRIFPAATADNNVERRTSRQARRLNRRKKHRSVRLHDLFEEYGLLTDFSKVSINLNPYQIRVQGLDKRLTNEELFIALKNIVKRRGISYLDDASEDGGAVSSDYGKAVEENRKLLAQQTPGQIQLDRFEKYGQVRGDFTVVENGEKRRLINVFSTSAYRKEAERILRKQQEFNNKITEGFIEDYLTILTGKRKYYHGPGNEKSRTDYGRYTTKKDSQGEYITLDNIFGILIGKCTFYPDEYRASKASYTAQEFNLLNDLNNLTVPTETKKLSVEQKKTIVEYAKTAKTLGASTLLKYIAKLIGVSVDQIHGYRIDPNEKPEMHTFEVYRKMQSLETIRVEELPRKVIDELAHILTLNTEREGIEEAINAKLKDIFSQDQVLELVQFRKNNSSLFSKGWHNFSLKLMMELIPELYETSEEQMTILTRLGKQKSKETSKRTKYIDEKELTEEIYNPVVAKSVRQAIKIINEATKRYGIFDNIVIEMARENNEEDAKKEYIKRQKANLDEKNAAMEKAAFQYNGKKELPDNVFHGHKELATKIRLWHQQGEKCLYTGKNIPISDLIQNRYKYEIDHILPLSLSFDDSLSNKVLVLATANQEKGQRTPFQALDSMDYAWSYREFKSYVKDSKLLSNKKKDYLLTEEDISKIEVKQKFIERNLVDTRYSSRVVLNALQDFYKEHQFDTTISVVRGQFTSQLRRKWGIEKSRETYHHHAVDALIIAASSQLRLWKKHNNPLISYKEEQFVDSETGEIISMSDDEYKELVFKAPYDHFVDTLKSKKFEDSILFSYQVDSKYNRKISDATIYATRKAKLDKDKSEETYVLGKIKDIYSQAGYDTFIKIYNKDKSRFLMYHKDPQTFEKVIEEILRTYPSKELNEKNKEVPCNPFEKYRQENGPIRKYSRKGNGPEIKSLKYYDNKLGNHIDITPNESMNQVVLQSLKPWRTDVFFNHQTEKYELMGLKYSDLNFEKGSGKYSISLEKYNSIKMNEGVSEESEFKFTLYKNDLILIKDALTKEAQIFRYGSRNDTSKHYVELKPYDMSKFEGDERLIKVLGTVAKGGRCIKGLNKKDISIFKVKTDVLGNKHFIKKEGEEPKLKF

SEQ ID NO: 590 - protein, 1337 aa, Listeria monocytogenes
MKNMKNPYTIGLDIGTNSVGWAVLTDQYDLVKRKMKVAGNSDKKQIKKNFWGVRLFDDGQTAVDRRMNRTARRRIERRRNRISYLQEIFAVEMANIDANFFCRLNDSFYVDSEKRNSRHPFFATIEEEVAYHKNYRTIYHLREELVNSSEKADLRLVYLALAHIIKYRGNFLIEGALDTKNTSVDEVYKQFIQTYNQVFMSNIEEGALAKVEENTEVASILAGKFTRREKFERILRLYPGEKSTGMFAQFISLIVGNKGNFQKVFNLVEKTDIECAKDSYEEDLEALLAIIGDEYAELFVAAKNTYNAVVLSSIITVTATETNAKLSASMIERFDAHEKELGELKAFIKLHLPKQYQEIFNNAEIDGYAGYIDGKTKQVDFYKYLKTTLENVEGADYFITKIEEENFLRKQRTFDNGVIPHQLHLEELEAILHQQAKYYPFLREGYDKIKSLVTFRIPYFVGPLANGQSEFAWLTRKDDGEIRPWNIEEKVDFGKSAVDFIEKMTNKDTYLPKENVLPKHSLCYQKYMVYNELTKIRYIDDQGKTNYFSGREKQQIFNDLFKQKRKVKKKDLELFLRNINHIESPTIEGLEDSFNASYATYHDLLKVGLKQEILDNPLNTEILEDIVKILTVFEDKRMIKEQLEQFSDVLDGVVLKKLERRHYTGWGRLSAKLLVGIRDKQSHLTILDYLMNDDGLNRNLMQLINDSNLSFKSIIEKEQVSTTDKDLQSIVADLAGSPAIKKGILQSLKIVDELVSIMGYPPQTIVVEMARENQTTGKGKNNSKPRYKSLEKAIKDFGSQILKEHPTDNQELKNNRLYLYYLQNGKDIYTGQELDIHNLSNYDIDHIVPQSFITDNSIDNLVLTSSAGNREKGGDVPPLEIVRKRKVFWEKLYQGNLMSKRKFDYLTKAERGGLTEADKARFIHRQLVETRQITKNVANILHQRFNKETDNHGNTMEQVRIVTLKSALVSQFRKQFQLYKVREVNDYHHAHDAYLNGVVANTLLKVYPQLEPEFVYGEYHQFDWFKANKATAKKQFYTNIMLFFAQKERIIDENGEILWDKKYLETIKKVLDYRQINIVKKTEIQKGEFSKATIKPKGNSSKLIPRKENWDPMKYGGLDSPNMAYAVIIEHAKGKKKIVIEKKLIQINIMERKMFEKDEEAFLEEKGYHQPKVLTKLPKYTLYECEKGRRRMLSSANEAQKGNQLVLSNHLVSLLYHAKNCEASDGKSLKYIEAHRETFSELLAQVSEFATKYTLADANLSKINNLFEQNKEGDIKAIAQSFVDLMAFNAMGAPASFKFFEATIDRKRYTNLKELLSSTIIYQSITGLYESRKRLDD

SEQ ID NO: 591 - protein, 1384 aa, Coriobacterium glomerans; identical to SEQ ID NO: 150

SEQ ID NO: 592 - protein, 1337 aa, Listeria ivanovii
MKGMRKPYTIGLDIGTNSVGWAVLTDQYNLVKRKMKVAGSAEKKQIKKNFWGVRLFDEGEVAAGRRMNRTTRRRIERRRNRIAYLQEIFAAEMAEVDANFFYRLEDSFYIESEKRHSRHPFFATIEEEVAYHEEYKTIYHLREKLVNSSDKADLRLVYLALAHIIKYRGNFLIEGMLDTKNTSVDEVFKQFIQTYNQIFASDIEEGSLTRLEENKEVAEILSEKLTRREKLDKILKLYTGEKSTGMFARFINLIIGSKGDFKKVFDLDEKAEIECAKDTYEEDLEALLAKIGDEYAEIFVAAKSTYNAVVLSNIITVTDTETKAKLSASMIERFDKHAKDLKRLKAFFKMQLPEKFNEVFNDIEKDGYAGYIDGKTTQEKFYKYMKKMLANIDGADYFIDQIEEENFLRKQRTFDNGTIPHQLHLEELEAILHQQAKYYPFLRKDYEKIRSLVTFRIPYFIGPLANGQSDFAWLTRKADGEIRPWNIEEKVDFGKSAIDFIEKMTNKDTYLPKENVLPKHSLCYQKYMVYNELTKIRYIDDQGKTHHFSGQEKQQIFNGLFKQQRKVKKKDLERFLYTINHIESPTIEGVEDAFNSSFATYHDLQKGGVTQEILDNPLNADMLEEIVKILTVFEDKRMIKEQLQSFSDVLDGTILKKLERRHYTGWGRLSAKLLTGIRDKHSHLTILDYLMNDDGLNRNLMQLINDSNLSFKSIIEKEQVSTADKGIQSIVAELAGSPAIKKGILQSLKIVDELVGIMGYPPQTIVVEMARENQTTGKGKNNSKPRFISLEKAIKEFGSQILKEHPTDNQCLKNDRLYLYYLQNGKDMYTGKELDIHNLSNYDIDHIIPQSFITDNSIDNRVLVSSTANREKGDNVPLLEVVRKRKAFWEKLYQAKLMSKRKFDYLTKAERGGLTEADKANFIQRQLVETRQITKNVANILYQRFNCKQDENGNEVEQVRIVTLKSTLVSQFRKQFQLYKVREVNDYHHAHDAYLNGVVANTLLKVYPQLEPEFVYGDYHQFDWFKANKATAKKQFYTNIMRFFAKENQIIDKNGEILWDNRYLDTIKKVLSYRQMNIVKKTEIQKGEFSNATVNPKGNSSKLISRKADWNPIKYGGFDGSNMAYSIVIEYEKRKKKTVIKKELIQINIMERVAFEKDQKAFLEEKGYYSPKVLTKIPKYTLYECENGRRRMLGSANEAQKGNQMVLPNHLMTLLYHAKNCEANDGESLAYIEMHREMFAELLAYISEFAKRYTLANDRLEKINMFFEQNKKGDIKVIAKSFDKLKVFNAFGAPRDFEFFETTIKRKRYYNIKELLNATIIYQSITGLYEARKRLED

SEQ ID NO: 593 - protein, 1079 aa, Listeria ivanovii
MMSKLILGLDIGISSVGWGVLDESTNEVVDAGVRLFEEATRNGNEDRRGFRSARRLKRRRQHRLERAKGLIENNGFSCTDINKFNPYQARYNAIFGEVTKDELAAALFHLVKRRGTTIDAPEEEVKDVENELSTKMQLEKNAKKLATKYDYICEIQLEKLKENKVVRDHENRFRTEDYVKEARAILENQQEYYPEVTNEFIESYMALIETRRMYYDGPGSEKSPTPYGQYFIDKNGTPQHITMIDKMRGKCTYFPEEVRIAKMSYTAELFGLLNDFNNIYFADPETGEKIGFTEADKKYFIDTFIHDQKGVKNITLKQIMKHKNIINETDIFGYRINTKNGTPIFTEFKGLKALKKALKEVDLPDEFYQNTEMMDEIANILSSEKSFTRREEQLKELFLAAFNDELEEAVKELINDITFKEFHSLSKKAIMVILPELWSTNQNQMQLFVQHKMDKSRLENLQNGTKIQFDDEAILSTIAKRAHRETIKIVDAVRAKYGELDYVIVEMAREKNSDEQKKVYNRAQKKQGDFEKEMCKLLGVSELKELRLNGKQHLALKFWKEQDGKCIYSGKPIALSDIVNNFNGLLEIDHIIPISISYDDSQQNKVLCLRSENQRKGQLSPYQYLIRGMGERSFDAFKAEVLSRHFGKKKQNYLLEMEDIANNDELRKHFINRNLVDTRYAMRTFSNTLKTFYTVNGIPTKVMPVNGAMTSALRKRAKLNKDRDAGHAHHAIDALIVAAIGRLPLIKQLAELRVNEEGEFADKITDKGLDDKTAFDDKTLKFLRNLLNYESKVKYSHKVDRKPNRSLSKQTLYSTREKDGEKYIIGKVKNIYTLDKAGYAALKKRIDKNPEDFLMAQHNPKTWEEIIKIMEVYSKADNPFKEFYDEHGFIMKDGKVPVKSLRYHDKKLGIHVPLTHKYENTRHDVVLLKRNSLRVDIYMNKEGVYKYQGVPYNWFNQKGDKYILDMEKYHNEIDGTRASFKNIDNTFEFQFSLYKNDVFSYMKKDKEGEFVSYTKLFRSDSSPRENRLEVENIDMRTSSQQMPTINPLKNLIKYNTDILGNTYPIQKEKFVTVFTLHSK

SEQ ID NO: 594 - protein, 1095 aa, Actinomyces naeslundii
MSAHHLRVGIDVGTHSVGLATLRVDDHGTPIELLSALSHIHDSGVGKEGKKDHDTRKKLSGIARRARRLLHHRRTQLQQLDEVLRDLGFPIPTPGEFLDLNEQTDPYRVWRVRARLVEEKLPEELRGPAISMAVRHIARHRGWRNPYSKVESLLSPAEESPFMKALRERILATTGEVLDDGITPGQAMAQVALTHNISMRGPEGILGKLHQSDNANEIRKICARQGVSPDVCKQLLRAVFKADSPRGSAVSRVAPDPLPGQGSFRRAPKCDPEFQRFRIISIVANLRISETKGENRPLTADERRHVVTFLTEDSQADLTWVDVAEKLGVHRRDLRGTAVHTDDGERSAARPPIDATDRIMRQTKISSLKTWWEEADSEQRGAMIRYLYEDPTDSECAEIIAELPEEDQAKLDSLHLPAGRAAYSRESLTALSDHMLATTDDLHEARKRLFGVDDSWAPPAEAINAPVGNPSVDRTLKIVGRYLSAVESMWGTPEVIHVEHVRDGFTSERMADERDKANRRRYNDNQEAMKKIQRDYGKEGYISRGDIVRLDALELQGCACLYCGTTIGYHTCQLDHIVPQAGPGSNNRRGNLVAVCERCNRSKSNTPFAVWAQKCGIPHVGVKEAIGRVRGWRKQTPNTSSEDLTRLKKEVIARLRRTQEDPEIDERSMESVAWMANELHHRIAAAYPETTVMVYRGSITAAARKAAGIDSRINLIGEKGRKDRIDRRHHAVDASVVALMEASVAKTLAERSSLRGEQRLTGKEQTWKQYTGSTVGAREHFEMWRGHMLHLTELFNERLAEDKVYVTQNIRLRLSDGNAHTVNPSKLVSHRLGDGLTVQQIDRACTPALWCALTREKDFDEKNGLPAREDRAIRVHGHEIKSSDYIQVFSKRKKTDSDRDETPFGAIAVRGGFVEIGPSIHHARIYRVEGKKPVYAMLRVFTHDLLSQRHGDLFSAVIPPQSISMRCAEPKLRKAITTGNATYLGWVVVGDELEINVDSFTKYAIGRFLEDFPNTTRWRICGYDTNSKLTLKPIVLAAEGLENPSSAVNEIVELKGWRVAINVLTKVHPTVVRRDALGRPRYSSRSNLPTSWTIE

SEQ ID NO: 595 - protein, 1422 aa, Sutterella wadsworthensis
MTQSERRFSCSIGIDMGAKYTGVFYALFDREELPTNLNSKAMTLVMPETGPRYVQAQRTAVRHRLRGQKRYTLARKLAFLVVDDMIKKQEKRLTDEEWKRGREALSGLLKRRGYSRPNADGEDLTPLENVRADVFAAHPAFSTYFSEVRSLAEQWEEFTANISNVEKFLGDPNIPADKEFIEFAVAEGLIDKTEKKAYQSALSTLRANANVLTGLRQMGHKPRSEYFKAIEADLKKDSRLAKINEAFGGAERLARLLGNLSNLQLRAERWYFNAPDIMKDRGWEPDRFKKTLVRAFKFFHPAKDQNKQHLELIKQIENSEDIIETLCTLDPNRTIPPYEDQNNRRPPLDQTLLLSPEKLTRQYGEIWKTWSARLTSAEPTLAPAAEILERSTDRKSRVAVNGHEPLPTLAYQLSYALQRAFDRSKALDPYALRALAAGSKSNKLTSARTALENCIGGQNVKTFLDCARRYYREADDAKVGLWFDNADGLLERSDLHPPMKKKILPLLVANILQTDETTGQKFLDEIWRKQIKGRETVASRCARIETVRKSFGGGFNIAYNTAQYREVNKLPRNAQDKELLTIRDRVAETADFIAANLGLSDEQKRKFANPFSLAQFYTLIETEVSGFSATTLAVHLENAWRMTIKDAVINGETVRAAQCSRLPAETARPFDGLVRRLVDRQAWEIAKRVSTDIQSKVDFSNGIVDVSIFVEENKFEFSASVADLKKNKRVKDKMLSEAEKLETRWLIKNERIKKASRGTCPYTGDRLAEGGEIDHILPRSLIKDARGIVFNAEPNLIYASSRGNQLKKNQRYSLSDLKANYRNEIFKTSNIAAITAEIEDVVTKLQQTHRLKFFDLLNEHEQDCVRHALFLDDGSEARDAVLELLATQRRTRVNGTQIWMIKNLANKIREELQNWCKTTNNRLHFQAAATNVSDAKNLRLKLAQNQPDFEKPDIQPIASHSIDALCSFAVGSADAERDQNGFDYLDGKTVLGLYPQSCEVIHLQAKPQEEKSHFDSVAIFKEGIYAEQFLPIFTLNEKIWIGYETLNAKGERCGAIEVSGKQPKELLEMLAPFFNKPVGDLSAHATYRILKKPAYEFLAKAALQPLSAEEKRLAALLDALRYCTSRKSLMSLFMAANGKSLKKREDVLKPKLFQLKVELKGEKSFKLNGSLTLPVKQDWLRICDSPELADAFGKPCSADELTSKLARIWKRPVMRDLAHAPVRREFSLPAIDNPSGGFRIRRTNLFGNELYQVHAINAKKYRGFASAGSNVDWSKGILFNELQHENLTECGGRFITSADVTPMSEWRKVVAEDNLSIWIAPGTEGRRYVRVETTFIQASHWFEQSVENWAITSPLSLPASFKVDKPAEFQKAVGTELSELLGQPRSEIFIENVGNAKHIRFWYIVVSSNKKMNESYNNVSKS

SEQ ID NO: 596 - protein, 1186 aa, Porphyromonas catoniae
MGKKVLGLDLGVGSIGWCLITLDKDEKPQSILGMGSRIVPLSADDATEFTQGKAITKNKMRTVARTIRKGMDRYQLRREALKKVLREHGMLPDEALIKLPLLELWELRARAATPGEQLSLTELGRVLLHINQKRGYKHAKADEAAEAETESKAKKEKESYVAQVKGRYQALKEKGQTIGQHFAGELRANQQTAPRGTYYTYRIKKQVYPREAYIEEYDRIMAAQRVFYPELLTDALIGRIRDRIIFYQRPLKSCKQLVSFCEFEKKEKVIRVKHTNKEGVEELVEKTITIGPKVAPKSSPIFQVCKVWESIHNIRLYHPDGTERVLEQEEKQKLFDYLQENDKLSLTVLRKELKIKPKDKLWCDKLLVNGIAGNTTAAILRKVLKGYEQYEGLLRFNLTTRDSHEVDEDGVIRPIIDESYQNEPLYKLWHILYSIEDREEMRSALIGQLGIKAEDLDSGLMDALYKIDFVKQGYGNKSAKFICKLLPHLQEGKMYSEAAEAAGVRHSDSMTAQERDERSLLEEIPLLQKNALRQPVVEKILNQMINLVNALKREHGEIDEVRVELARELKMSREEREQVLSNNRKRKGKNETIAKRIAAEDITPTKARIQKYSLWEESGGRCIYCGNPVGVVQFLRGEEIEVEHIIPRSILFDDSMSNKVCACRSCNQEKGNRFAMVYIQTKGWEQDYISRIETLFKGKKISDSKRQRLLMLPENLPEDFIERHLRLTQYISREAQGILRKGIRLVSASEGGVTAKLRQLWGYDNILRDLNLERYRSMGETEVVTVEHRDGERTDERIKDWSKRKDHRHHAVDALIVACTRQSYIQRLNRVNAEADRQEMDAFIKEQQEQKPSKKEKLSLLEHWLIRQPHFTTGEVTKHVEGILVSLRPGKRTISRGRNIYKRSGKTDVQRGVLIPRGALSEETIYGVISVDGVDKVVCKYPLQSLKPKDVGYIVDEVLREKVRERISQYGEKQAFAEPLYLDEAKTQEVRSVRCFTGKDQSKLVPLRYNIEGEAVGFVAPGNNHHLALYKDDDGNVVESIVTFWQAVERARYGLPIVVVNPREVMEKALAIPELPESVLRALPASNLRLMEVLRMNDMFLIGMKDGEIQAAIEGEDYPTLSRHLYRVQKLATHDYVFRYHLETTLDGKDNVGEIPKSYRAQSLKAYVKLNPRKVKIDLLGRISLV

SEQ ID NO: 597 - protein, 1436 aa, Bacteroides fragilis
MKRILGLDLGTNSIGWALVNEAENKDERSSIVKLGVRVNPLTVDELTNFEKGKSITTNADRTLKRGMRRNLQRYKLRRETLTEVLKEHKLITEDTILSENGNRTTFETYRLRAKAVTEEISLEEFARVLLMINKKRGYKSSRKAKGVEEGTLIDGMDIARELYNNNLTPGELCLQLLDAGKKFLPDFYRSDLQNELDRIWEKQKEYYPEILTDVLKEELRGKKRDAVWAICAKYFVWKENYTEWNKEKGKTEQQEREHKLEGIYSKRKRDEAKRENLQWRVNGLKEKLSLEQLVIVFQEMNTQINNSSGYLGAISDRSKELYFNKQTVGQYQMEMLDKNPNASLRNMVFYRQDYLDEFNMLWEKQAVYHKELTEELKKEIRDIIIFYQRRLKSQKGLIGFCEFESRQIEVDIDGKKKIKTVGNRVISRSSPLFQEFKIWQILNNIEVTVVGKKRKRRKLKENYSALFEELNDAEQLELNGSRRLCQEEKELLAQELFIRDKMTKSEVLKLLFDNPQELDLNFKTIDGNKTGYALFQAYSKMIEMSGHEPVDFKKPVEKVVEYIKAVFDLLNWNTDILGFNSNEELDNQPYYKLWHLLYSFEGDNTPTGNGRLIQKMTELYGFEKEYATILANVSFQDDYGSLSAKAIHKILPHLKEGNRYDVACVYAGYRHSESSLTREEIANKVLKDRLMLLPKNSLHNPVVEKILNQMVNVINVIIDIYGKPDEIRVELARELKKNAKEREELTKSIAQTTKAHEEYKTLLQTEFGLTNVSRTDILRYKLYKELESCGYKTLYSNTYISREKLFSKEFDIEHIIPQARLFDDSFSNKTLEARSVNIEKGNKTAYDFVKEKFGESGADNSLEHYLNNIEDLFKSGKISKTKYNKLKMAEQDIPDGFIERDLRNTQYIAKKALSMLNEISHRVVATSGSVTDKLREDWQLIDVMKELNWEKYKALGLVEYFEDRDGRQIGRIKDWTKRNDHRHHAMDALTVAFTKDVFIQYFNNKNASLDPNANEHAIKNKYFQNGRAIAPMPLREFRAEAKKHLENTLISIKAKNKVITGNINKTRKKGGVNKNMQQTPRGQLHLETIYGSGKQYLTKEEKVNASFDMRKIGTVSKSAYRDALLKRLYENDNDPKKAFAGKNSLDKQPIWLDKEQMRKVPEKVKIVTLEAIYTIRKEISPDLKVDKVIDVGVRKILIDRLNEYGNDAKKAFSNLDKNPIWLNKEKGISIKRVTISGISNAQSLHVKKDKDGKPILDENGRNIPVDFVNTGNNHHVAVYYRPVIDKRGQLVVDEAGNPKYELEEVVVSFFEAVTRANLGLPIIDKDYKTTEGWQFLFSMKQNEYFVFPNEKTGFNPKEIDLLDVENYGLISPNLFRVQKFSLKNYVFRHHLETTIKDTSSILRGITWIDFRSSKGLDTIVKVRVNHIGQIVSVGEY

SEQ ID NO: 598 - protein, 1024 aa, Helicobacter mustelae
MIRTLGIDIGIASIGWAVIEGEYTDKGLENKEIVASGVRVFTKAENPKNKESLALPRTLARSARRRNARKKGRIQQVKHYLSKALGLDLECFVQGEKLATLFQTSKDFLSPWELRERALYRVLDKEELARVILHIAKRRGYDDITYGVEDNDSGKIKKAIAENSKRIKEEQCKTIGEMMYKLYFQKSLNVRNKKESYNRCVGRSELREELKTIFQIQQELKSPWVNEELIYKLLGNPDAQSKQEREGLIFYQRPLKGFGDKIGKCSHIKKGENSPYRACKHAPSAEEFVALTKSINFLKNLTNRHGLCFSQEDMCVYLGKILQEAQKNEKGLTYSKLKLLLDLPSDFEFLGLDYSGKNPEKAVFLSLPSTFKLNKITQDRKTQDKIANILGANKDWEAILKELESLQLSKEQIQTIKDAKLNFSKHINLSLEALYHLLPLMREGKRYDEGVEILQERGIFSKPQPKNRQLLPPLSELAKEESYFDIPNPVLRRALSEFRKVVNALLEKYGGFHYFHIELTRDVCKAKSARMQLEKINKKNKSENDAASQLLEVLGLPNTYNNRLKCKLWKQQEEYCLYSGEKITIDHLKDQRALQIDHAFPLSRSLDDSQSNKVLCLTSSNQEKSNKTPYEWLGSDEKKWDMYVGRVYSSNFSPSKKRKLTQKNFKERNEEDFLARNLVDTGYIGRVTKEYIKHSLSFLPLPDGKKEHIRIISGSMTSTMRSFWGVQEKNRDHHLHHAQDAIIIACIEPSMIQKYTTYLKDKETHRLKSHQKAQILREGDHKLSLRWPMSNFKDKIQESIQNIIPSHHVSHKVTGELHQETVRTKEFYYQAFGGEEGVKKALKFGKIREINQGIVDNGAMVRVDIFKSKDKGKFYAVPIYTYDFAIGKLPNKAIVQGKKNGIIKDWLEMDENYEFCFSLFKNDCIKIQTKEMQEAVLAIYKSTNSAKATIELEHLSKYALKNEDEEKMFTDTDKEKNKTMTRESCGIQGLKVFQKVKLSVLGEVLEHKPRNRQNIALKTTPKHV

SEQ ID NO: 599 - protein, 1094 aa, Afipia sp.
MKYRVGFDLGTNSLGWAVVRLNASGEPDRIEVAGSRIFSDGREPKSGASLAGARRDARAMRRRRDRFKQRQAALIKYLTQAGFFPADESERKALSALDPYELRARALDEALPLAHLGRALFHLNQRRGFKSNRKTDRGKNDDTGKIRIGVARLYEQMRDADARTLGEFLHKRRAAASDPNAIPHVRTRIVTLAAEDGKASDVYDFYPDRQTLEEEFEAIWEAQTSHHPEALTEERRAQFYEIIFHQRPLKQPKIGFCTLLPPEKRLPKAHPLFQRRRLLEEVNALRIVLPGKETRALEKAERDALLSKLNQRKKAAYESLRKALKLDPDARFNKESDNREDMIGDEIAAEMAHKSRFGKVWLGMSAEAQAQVIERLRGLESDADADDFEAWLRDDHGLAQEQAKAVTAANLPEGYGRFGETATRKLIAALEQEVIVYSEAVQRAGLGHHSDLRDGQVWTDKKGNPALPYYGAVLERHIVPGTADPNETDDALRIGRLTNPTVHIGLNQLRRVVNALMRRYGQPQEIAIELARELKLSDDRKKEINTRNRENRKAAEKRSQKLRNIGQADKGGNRALLKLWEELNPENVLDRRCVYTGRVISIDMLFSGAAEVDHILPFSVSLDDSNGNRILCLREVNRIKRQRTPWEARDDLRAHFGPDAGWEAIAARAARLPREKRWRFEPDAANRFDAQGGFLARHLTDTQHLSRLARSYLSALYPETGEGSGHVWVSPGRLTEMLRRAWSLNHHLPDHNIAGAANQPKNRKDHRHHAIDAIVVALADRAMLNRIARESGKEGHEAAGRLVASIPEPWEGFSDEVGRAVRAITVSHRPDHGTASKAGRAKDKDATAGRLHNETAYGLTGEKDARGLDIVVTRKPLSAFKKSADLDAIRDDDLKQKLKAWAAGKEGGAFEQAMRSFGDPERGPRSHPGLRRIRVTEPLSVIPIRDRDGRPYKAYKGDSNYRFDIWELKTGKWKDEVVSMFEAHRPNWTSPIRAGNPTARKVLSVRQNDVIAIERENGPELMRVVKFSAGSLALAPPQEAGSLKARDADKNDPFKYVYGSPSSLQRWKARQVRIDELGRVFDPGFAVRSRRSSE

SEQ ID NO: 600 - protein, 1156 aa, Lactobacillus casei
MIIRTYELKTITTIAILKMFQLLTGGLSMTKLGKPYGIGVDIGSNSIGFAAVDENSHLIRLKGKTVIGARLFEEGKAAAKRRAGRTTRRRLSRNRWRLSFLRDFFESHITPTDPNFFMRQKYSEISPKDKARYKYEKRLFNDRTDAEFYQQYSTMYHLRNRLMTDPSRADVREIYFAIHHILKSRGHFLTPGDAKDFNTNDVALDEIFPALQDAYAQVYPDLGITFDEDKANEFKTILLNEIATSIDTQRALVKLLLAEEDDKDILKQQKQVLTEFAKAVVGLKTKLNLALGTEVDSSEATAWNFSLGQLDDKWAGIESAMTDEGTEILDQIRDLYRARLLNGIVPTGKTLSQAKVDDYTQHHEDLQLFKAYLKQLEDDGTAKAIRQLYDRYIDGDDAAPFLRENFVKALTKDVTAHPNTKSPELLERLAQPDFMLKQRNKANGAIPVQMQQRELDQIIKNQAVYYDWLAAPNPVEKHRKSMPYQLDELLNFRIPYYVGPLVTAKEQKAAQGGVFAWMVRKDPEGNITPYNFDEKVDREASANTFIQRMKTTDTYLIGEDVLPKQSLLYQRYEVLNELNNVRVNNEKLSIEQKQQVIRELFERHNSVTIKQFAENLRAHGDYAHIPEIRGLADEKRFLSSLSTYRQLKSLLPEAIDDPAKQADIENIIAWSTVFEDAAIFKTKLKEISWLGSEAITKLSNIRYRGWGQFSRKFLNGLTLGNGHTIIQELLLSTNNLMQILTDETLQKKMTELNADKLKTANINDAIDNAYTSPSNKKALRQVLRVVDDIKRAADGQDPSWLYVETADGGGTPGKRTRARQHQLQEIYANAAHELIDTAVRGELEDKISDKADFNDRLVLYFMQGGRDIYTGAPLNIDQLSSYDIDHILPQSLIKDNSLDNRVLVHAIINREKNATFASTIYAQKMNATWRQWHEAGLISGRKLRNLQMRPDQIDKYASGFVARQLVETRQIIKLTEQIVAAQYPDTKIIAVKAGLSHQLREELEFPKNRDVNHYHHAFDAFLAARIGTYLLKRFPNLQAFFTYGKFTKADVKKLRGFNFIRDITHAEDKIVAKDTGEVVWDKQRDVDELDRIYNFKRMLITHEVRFETADLFKQTVYGARDSKEAGGSKQLIPKKKDIQLIFMGAISERTRPILPL

SEQ ID NO: 601 - protein, 1105 aa, Actinomyces coleocanis
MDNKNYRIGIDVGLNSIGFCAVEVDQHDTPLGFLNLSVYRHDAGIDPNGKKTNTTRLAMSGVARRTRRLFRKRKRRLAALDRFIEAQGWTLPDHADYKDPYTPWLVRAELAQTPIRDENDLHEKLAIAVRHIARHRGWRSPWVPVRSLHVEQPPSDQYLALKERVEAKTLLQMPEGATPAEMVVALDLSVDVNLRPKNREKTDTRPENKKPGFLGGKLMQSDNANELRKIAKIQGLDDALLRELIELVFAADSPKGASGELVGYDVLPGQHGKRRAEKAHPAFQRYRIASIVSNLRIRHLGSGADERLDVETQKRVFEYLLNAKPTADITWSDVAEEIGVERNLLMGTATQTADGERASAKPPVDVTNVAFATCKIKPLKEWWLNADYEARCVMVSALSHAEKLTEGTAAEVEVAEFLQNLSDEDNEKLDSFSLPIGRAAYSVDSLERLTKRMIENGEDLFEARVNEFGVSEDWRPPAEPIGARVGNPAVDRVLKAVNRYLMAAEAEWGAPLSVNIEHVREGFISKRQAVEIDRENQKRYQRNQAVRSQIADHINATSGVRGSDVTRYLAIQRQNGECLYCGTAITFVNSEMDHIVPRAGLGSTNTRDNLVATCERCNKSKSNKPFAVWAAECGIPGVSVAEALKRVDFWIADGFASSKEHRELQKGVKDRLKRKVSDPEIDNRSMESVAWMARELAHRVQYYFDEKHTGTKVRVFRGSLTSAARKASGFESRVNFIGGNGKTRLDRRHHAMDAATVAMLRNSVAKTLVLRGNIRASERAIGAAETWKSFRGENVADRQIFESWSENMRVLVEKFNLALYNDEVSIFSSLRLQLGNGKAHDDTITKLQMHKVGDAWSLTEIDRASTPALWCALTRQPDFTWKDGLPANEDRTIIVNGTHYGPLDKVGIFGKAAASLLVRGGSVDIGSAIHHARIYRIAGKKPTYGMVRVFAPDLLRYRNEDLFNVELPPQSVSMRYAEPKVREAIREGKAEYLGWLVVGDELLLDLSSETSGQIAELQQDFPGTTHWTVAGFFSPSRLRLRPVYLAQEGLGEDVSEGSKSIIAGQGWRPAVNKVFGSAMPEVIRRDGLGRKRRFSYSGLPVSWQG

SEQ ID NO: 602 - protein, 1045 aa, Acidovorax avenae
MQKEKPLAYRLALDLGSTSLGWAVLRLSAPGEPSAVIRAGSRIFSDGRNPKDGSSLAVTRRAARAMRRRRDRLLKRKARMLAALERHGFFPQDEAARKALEKLNPYGLRARGLESALKPEEFGRALFHLNQRRGFQSNRKTDRKDSDSGALKQAIGTLRAQMHESGCRTVGEWFWKVRMERKPEGVKGQGVRARYRETPFTTDEGKKRIDKRYDLYVDRAMVAQEFDALWAAQATFAPALFNEAARAELRDILLHQRKLRPVQPGRCTLVPEEPRALLALPSTQRFRIYQEVNHLRVLHDELREEALTLAQRDQIVALLERQAKVTFTAMRKALGFSALFNLEDAKRDGLKGNATTAALGKKDLFGPLWAGFDTALQDEIVTQLMTEESEPRLIAWLQEHTGVDEARAQAIANAGLPEGYGSLGRTALARIVPELQRDVITYDKAVQAAGFAHHSDLGFSFEHDADEVERIGERTIASTGEIKPVFAFKQLPYYGRALQRHVAFAKENPRNDEERYGKIANPTVHIGLNQVRVVVNALMCRYGRPTEVVIELARDLKQSREQKLEAQQRQADNQKRNARIRRSIAEVLGISEERVRTLDIQKWILWEELSHDAADRRCPYSGVQISASMLLGERVEIEHILPFSMTLDDSLNNRTVALREANRIKRNRTPWDARTDFEAHGWSYDGILQRAERMPQRKRHRFAPDGYERWLGEDKDFLARALNDTRYLSRVAAEYLRLVCPGSATRVIPGQMTALLRGKFGLNDVLGLDGEKNRNDHRHHAVDACVIGVTDQRMMQRFAQANAQAREDGLTRLVEDMPLPWPTYRAHVERAVRHIWVSHKPDHGFEGAMMEETSYGILRDGTIKQRRKADGSAGREISRLIRITEPSQPQRHGVDAEGRPLPYKGYVGGSNYCLEITVNDKGKWEGQVISTFDAYRIVREGGLRQLRHSTQGQNGQALAMRLVIGDSVRLEVDEQERVMRIVKINGNNGQVFMAPVHEANVDARNSDKNEAFAYTSKIAGSFQKTKARQVTISPIGELRDPGFKG

SEQ ID NO: 603 - protein, 1046 aa, Gluconacetobacter diazotrophicus
MIDESLTFGIDLGIGSCGWAVLRRPSAFGRKGVIEGMGSWCFDVPETSKERTPTNQIRRSNRLLRRVIRRRRNRMAAIRRLLHAAGLLPSTDSDALKRPGHDPWELRARGLDKPLKPVEFAVVLGHIAKRRGFKSAAKRKATNISSDDKKMLTALEATRERLGRYRTVGEMFARDPDFASRRRNREGKYDRTTARDDLEHEVHALFAAQRRLGQGFASPELEEAFTASAFHQRPMQDSERLVGFCPFERTEKRAAKLTPSFERFRLLARLLNLRITTPDGERPLTVDEIALVTRDLGKTAKLSIKRVRTLIGLEDNQRFTTIRPEDEDRDIVARTGGAMTGTATLRKALGEALWTDMQERPEQLDAIVQVLSFFEANETITEKLREIGLTLAVLDVLLTALDAGVFAKFKGAAHISTKAARNLLPHLEQGRRYDEACTMAGYDHAASRLSHHGQIVAKTQFNALVTEIGESIANPIARKALIEGLKQIWAMRNHWGLPGSIHVELARDVGNSIEKRREIEKHIEKNTALRARERREVHDLLDLEDVNGDTLLRYRLWKEQGGKCLYTGKAIHIRQIAATDNSVQVDHILPWSRFGDDSFNNKTLCLASANQQKKRSTPYEWLSGQTGDAWNAFVQRIETNKELRGFKKRNYLLKNAKEAEEKFRSRNLNDTRYAARLFAEAVKLLYAFGERQEKGGNRRVFTRPGALTAALRQAWGVESLKKQDGKRINDDRHHALDALTVAAVDEAEIQRLTKSFHEWEQQGLGRPLRRVEPPWESFRADVEATYPEVFVARPERRRARGEGHAATIRQVKERECTPIVFERKAVSSLKEADLERIKDGERNEAIVEAIRSWIATGRPADAPPRSPRGDIITKIRLATTIKAAVPVRGGTAGRGEMVRADVFSKPNRRGKDEWYLVPVYPHQIMNRKAWPKPPMRSIVANKDEDEWTEVGPEHQFRFSLYPRSNIEIIRPSGEVIEGYFVGLHRNTGALTISAHNDPKSIHSGIGTKTLLAISKYQVDRFGRKSPVRKEVRTWHGEACISPTPPG

SEQ ID NO: 604 - protein, 1335 aa, Urinacoccus massiliensis
MKNYTIGLDIGTNSVGWAVIKDDLTLVRKKIKISGNTDKKEVKKNLWGSFLFEQGDTAQDTRVKRIARRRYERRRFRIRELQKIFDKSMGEVDSNFFHRLDESFLVEEDKEYSKYPIFSNEKEDKNYYDKYPTIYHLRKDLADSNQKADLRLIYLALAHMIKYRGHFLIEGDLKMDGISISESFQEFIDSYNEVCALEDENLEIIYNDELLTQIENIFKQDISRSKKLDQAIALFQGVKRQSLFGIFLTLIVGNKANFQKIFNLEDDIKLDLKEEDYDENLEELLSNIDEGYRDVFLQAKNVYNAIELSKILKTDGKETKAPLSAQMVELYNQHREDLKKYKDYIKAYLPEKYGETFKDATKNGYAGYIDGKTSQEDFYKFVKAQLKGEENGEYFLEAIENENFLRKQRSFYNGVIPYQIHLQELTAVLDQQEKHYSFLKENRDKIISLLTFRIPYYVGPLAKGESRFAWLERSNSEEKIKPWNFDKIVDIDKSAELFIENLTSRDTYLPDEPVLPKRSLIYQKFTIFNELTKISYIDERGILQNFSSREKIAIFNDLFKNKSKVTKNQLVKYIENKEQIIAPEIKGIEDSFNSNYSTYIDLSKIPDMKKLLEKDEDEILEEIIKILTIFEDRKMRKRQLMKFKDKLSEKAINQLSKKHYTGWGQLSEKLINGIRDEQSNKTILDYLIEDNGCPKNMNRNFMQLINDDTLSFKEKIRKAQDINQVNDIKEIVKDLPGSPAIKKGIYQSIRIVDEIIRKMKDRPKNIVIEMARENQTTQEGKNKSKARLKKIQEGLENLDSVHVEKQALDEEMLKSPKYYLYCLQNGKDIYTGKDLDIGQLQTYDIDHIIPRSFITDNSFDNLVLTSSTVNRGKLDNVPSPDIVRQQKGFWKQLLRAGLMSQRKFNNLTKGKLTDRDRQQFINRQLVETRQITKHVANLLSHHLNEKKEVGEINIVLLKSALTSQFRKKFDFYKVREVNDYHHAHDAYLNGVIALKLLELYPYMAKDLIYGKYSYHRKIEGDKATQAKYKMSNIIERFSQDLLANPDGEIAWEKDKDLNTIRKVLSSKQINIIKKAEEGKGRLFKETINSRPSKKTEKRIPIKNNLDPNIYGGYIEEKMAYYIAINYLENGKTKKAIVGISIKDKKDFEGQTTEYLGKIGFNKASIINSFKNYTLFELENGSRRMIVGASKENDSKGELQKGNQMYLPQNLLEFVYHLKHYNEDETSHKFIVEHKAYFDELLNYIVEFANKYLELENSIEKIKDLYHGKGPDVEEKELVESFINLLAITKCGPAADITFLGEKISRKRYRSTNCLWGSEVIFQSPTGLYETRLRLE

SEQ ID NO: 605 - protein, 1391 aa, Tissierellia bacterium
MKRNNDYYIGLDMGTNSVGWATTNPQGRLLRFNKKDMWGSRLFEEAKTAAKTRTFRTSRRRYDRVRQRIEFLQDIFAPIIAKKDFEFFMRLKESKFHLEDKKTDGKFALFNDADFTDVEYFDRYPTIYHLRAALIKPNHITDPRLLYLAIHHIIKNRGHFLFAGTDMESIRSFQIVYTQLSEHLKSINLDFELPVDAQDKFAAILLNEKLNKRDKKKQLKELCPHKDKRLEYAFNAIIGGKTKLKDIFGVEEYDEGTKKAVDFEKADYDEDKDEIESVIKENIHVLNALKAVYDWTILTNILGDYAYISESQVALYEAHKKDLRILKSLIKKYAKSQYADAFRHENVKGNYANYVGSTNYDNKQPVIDNPSVTQEDINKYFADILLSITPDESDRESYQYITERLHKGEALPKLRTKANSVLPHQIHKIELEKILANAAKNFPFLQEKDSSGYTAAQKIVKIMMFRIEYYVGPLNTYHHVDQGGHAWMVRKAEGKITPWNFDEKVDKEASAEKFIRNMTNKCTYLIGKDVIPKQSLLYSRYKVLNELNNLKVNGVPISVALKQKIYEELFKKQVNVTFNQLKTFLKTQGEDADEIILSGVDEAAHKFTNNLQTYHKFRAILRDKIEFEPQRSMVEDIIRWKCLMGDDITMWKHKIEKEYGDQLSEEQLKKITRLNFNGWSRLSQEFLTDVPGVDIESGEVYSGIMDALWRTNENIMQLLSSRFTFAAEVKKQNQGTGRIEKITYDEVMKDTYLSPAVKRSVWQAITLVEEIRKIRKADPKRIFVEMTRQPDAKKERKLSRRTQLLNAYRAIGNDIAEYEKEHVSTLITQLESKKDEDLRRKKLYLYFTQMGRCMYTGERIDLSSLLRDTNSNIYDIDHIYPRSLTKDDSLDNTVLCKKEINLKKGNKYIHRVFTDKELKKQYGYWKALKEKKLISERKFSRLMRTTDLTADELAGFISRQLVETSQMVKATADILEKIYPNVTIVYVKARTVSDFRHDYELPKVRALNDCHHAHDAYLNIVVGNVYYEKFTKSPFRFIANQKGKGDIKYNLYRLFDKDVKVGDRIIWNAKEDLARVKATLERDTVNVVRMPVEQRGQFFDATIQKKGTTKNMLVLPLKGSDERLQDTSKYGYYVRPSGMSFMVVQHEVKGKSRVTIEPALLVYKNKLKSEDDYAKYCEDVLKLQKPKVLFKNIKFGSKILFDGYPFLLKGRTENRIIMADAQSLFLGNQELKILKRVTKISDDIDHKVESRIKITDEEWTTLWKSVVEQIVTGKFRNRLGTLNGILQGRKIKLSKDEEARLNELDSKDQETFLSQILLERFLQFSTEEKTRLLLQVISFSGNTTGVDLRLIGGSSGTGTIKTNKNITDHSVILINESPTGLFTNRTVLNQP

SEQ ID NO: 606 - protein, 1374 aa, Fusobacterium nucleatum
MKKQKFSDYYLGFDIGTNSVGWCVTDLDYNVLRFNKKDMWGSRLFDEAKTAAERRVQRNSRRRLKRRKWRLNLLEEIFSDEIMKIDSNFFRRLKESSLWLEDKNSKEKFTLFNDDNYKDYDFYKQYPTIFHLRDELIKNPEKKDIRLIYLALHSIFKSRGHFLFEGQNLKEIKNFETLYNNLISFLEDNGINKSIDKDNIEKLEKIICDSGKGLKDKEKEFKGIFNSDKQLVAIFKLSVGSSVSLNDLFDTDEYKKEEVEKEKISFREQIYEDDKPIYYSILGEKIELLDIAKSFYDFMVLNNILSDSNYISEAKVKLYEEHKKDLKNLKYIIRKYNKENYDKLFKDKNENNYPAYIGLNKEKDKKEVVEKSRLKIDDLIKVIKGYLPKPERIEEKDKTIFNEILNKIELKTILPKQRISDNGTLPYQIHEVELEKILENQSKYYDFLNYEENGVSTKDKLLKTFKFRIPYYVGPLNSYHKDKGGNSWIVRKEEGKILPWNFEQKVDIEKSAEEFIKRMTNKCTYLNGEDVIPKDSFLYSEYIILNELNKVQVNDEFLNEENKRKIIDELFKENKKVSEKKFKEYLLVNQIANRTVELKGIKDSFNSNYVSYIKFKDIFGEKLNLDIYKEISEKSILWKCLYGDDKKIFEKKIKNEYGDILNKDEIKKINSFKFNTWGRLSEKLLTGIEFINLETGECYSSVMEALRRTNYNLMELLSSKFTLQESIDNENKEMNEVSYRDLIEESYVSPSLKRAILQTLKIYEEIKKITGRVPKKVFIEMARGGDESMKNKKIPARQEQLKKLYDSCGNDIANFSIDIKEMKNSLSSYDNNSLRQKKLYLYYLQFGKCMYTGREIDLDRLLQNNDTYDIDHIYPRSKVIKDDSFDNLVLVLKNENAEKSNEYPVKKEIQEKMKSFWRFLKEKNFISDEKYKRLTGKDDFELRGFMARQLVNVRQTTKEVGKILQQIEPEIKIVYSKAEIASSFREMFDFIKVRELNDTHHAKDAYLNIVAGNVYNTKFTEKPYRYLQEIKENYDVKKIYNYDIKNAWDKENSLEIVKKNMEKNTVNITRFIKEEKGELFNLNPIKKGETSNEIISIKPKLYDGKDNKLNEKYGYYTSLKAAYFIYVEHEKKNKKVKTFERITRIDSTLIKNEKNLIKYLVSQKKLLNPKIIKKIYKEQTLIIDSYPYTFTGVDSNKKVELKNKKQLYLEKKYEQILKNALKFVEDNQGETEENYKFIYLKKRNNNEKNETIDAVKERYNIEFNEMYDKFLEKLSSKDYKNYINNKLYTNFLNSKEKFKKLKLWEKSLILREFLKIFNKNTYGKYEIKDSQTKEKLFSFPEDTGRIRLGQSSLGNNKELLEESVTGLFVKKIKL

SEQ ID NO: 607 - protein, 1068 aa, Verminephrobacter eiseniae
MNKAVAYRLALDLGSTSLGWAIFRLNEAREPTAIIRAGVRIFSDGRNANSEPLAVHRRVARAMRRRRDRLLKRKKRMHDQLVQHGFFPAEVAERKELERLNPYQLRAKGLHEALTPGEFARALFHINQRRGFKSNRKTDRKDNDSGALKQAISELRKRIQDSDCATAGEWFWKERMQQKPEGVRGQWVRARYRKTPSTTDEGKKRIGYDLYVDRAMVEQEFDALWAAQAALQPGLFTEAARAELKDTLLYQRDLRPVKPGRCTLLPAEERAPLALPSTQRFRILQEVNNLRLLDEALREVPLNLAQRDAVVSALEGKKELSFAAIRKLLTLSGKFNLEDEKRAELKGNATSVILARKDLFGDAWAGFDAAVQDEIVWRLVSQESEGALIAWLQQHTGVDGVCAEAIVNTRLPDGYGRLSRKALERIVPALQREVCTYDKAVQAAGFAHHSDLGFDFDYAEDEVQQVGEHTIASTGEVQAQYAFKQLPYYGKALQRHVAFGSGDAKDHEEKCYGKIANPTVHIGLNQVRTVVNALIRRYGHPTEVVVELARDLKQSREQKQQTQREQADNQKRNEDIRKRIAPILETSPERVRDRDIKKWILWEELNKKDIADRHCPYSGERISATMLLSEAVEIEHILPFSRTLDDSLNNRTVAMRRANRIKGDRTPWEARADFEAQGWRYEAILQRAEGMPPRKRYRFAEDGYQRWLGKDRNFLARALNDTSYLSRLAANYLRLVCPQGVRVIPGQMTDKLRGKFGLNSVLGLDGKKNRNDHRHHAVDACVIGVTDQGLMQRFANASKQARENGLTRLVQDMLLPWWPSYYDHVERAVRHIRVSHRPDHGFEGAMMKGTAHGIREDGIREDGRIKQRPKAKGSADHKTITLIPIDEPRQLARHGVDAEGKPLPYKGYASGSNYCIEITKNGKGKWEGQVISTFDAYRIKAAADAAARAGQVISTVEADSIVRKSGWERLRGAQSQNGQPLVMRLVIGDSVRMEVDGRDEVMRVVKMSGKEMVFAPVREANVDKRNNMPDEQDPFTYTYKRADQLRKAKARQVTISPIGELRDPGFKG

SEQ ID NO: 608 - protein, 1113 aa, Alcanivorax pacificus
MRYRVGLDLGTASVGAAVFSMDEQGNPMELIWHYERLFSEPLVPDMGQLKPKKAARRLARQQRRQIDRRASRLRRIAIVSRRLGIAPGRNDSGVHGNDVPTLRAMAVNERIELGQLRAVLLRMGKKRGYGGTFKAVRKVGEAGEVASGASRLEEEMVALASVQNKDSVTVGEYLAARVEHGLPSKLKVAANNEYYAPEYALFRQYLGLPAIKGRPDCLPNMYALRHQIEHEFERIWATQSQFHDVMKDHGVKEEIRNAIFFQRPLKSPADKVGRCSLQTNLPRAPRAQIAAQNFRIEKQMADLRWGMGRRAEMLNDHQKAVIRELLNQQKELSFRKIYKELERAGCPGPEGKGLNMDRAALGGRDDLSGNTTLAAWRKLGLEDRWQELDEVTQIQVINFLADLGSPEQLDTDDWSCRFMGKNGRPRNFSDEFVAFMNELRMTDGFDRLSKMGFEGGRSSYSIKALKALTEWMIAPHWRETPETHRVDEEAAIRECYPESLATPAQGGRQSKLEPPPLTGNEVVDVALRQVRHTINMMIDDLGSVPAQIVVEMAREMKGGVTRRNDIEKQNKRFASERKKAAQSIEENGKTPTPARILRYQLWIEQGHQCPYCESNISLEQALSGAYTNFEHILPRTLTQIGRKRSELVLAHRECNDEKGNRTPYQAFGHDDRRWRIVEQRANALPKKSSRKTRLLLLKDFEGEALTDESIDEFADRQLHESSWLAKVTTQWLSSLGSDVYVSRGSLTAELRRRWGLDTVIPQVRFESGMPVVDEEGAEITPEEFEKFRLQWEGHRVTREMRTDRRPDKRIDHRHHLVDAIVTALTSRSLYQQYAKAWKVADEKQRHGRVDVKVELPMPILTIRDIALEAVRSVRISHKPDRYPDGRFFEATAYGIAQRLDERSGEKVDWLVSRKSLTDLAPEKKSIDVDKVRANISRIVGEAIRLHISNIFEKRVSKGMTPQQALREPIEFQGNILRKVRCFYSKADDCVRIEHSSRRGHHYKMLLNDGFAYMEVPCKEGILYGVPNLVRPSEAVGIKRAPESGDFIRFYKGDTVKNIKTGRVYTIKQILGDGGGKLILTPVTETKPADLLSAKWGRLKVGGRNIHLLRLCAE

SEQ ID NO: 609 - protein, 1380 aa, Prevotella intermedia
MKRILGLDLGTTSIGWALVNEAENNNEASSIVRLGVRVNPLTVDEKSNFEKGKAITTNADRQLRHGARINLQRYKLRRQNLHDCLQKQGWLGTEAMYEEGKASTFETYKLRAKAAEEEISLHEFARVLFMLNKKRGYKSNRKANNKEDGQLFDGMTIAKKLYEEHLTPAEYSLQLLNKGKKFTQGYYRSDLNAELERIWDEQKKYYPEILTDEFKQQLEGKTKTNTSKIFLAKYGIYSADLKGLDRKFQPLKWRVEALQQQVDKEVLAFVISDLKGQIANTSGLLGAISDRSKELYFNKQTVGQYLWASLEENPHISIKNKPFYRQDYLDEFEKIWETQAAFHKQLTPELKQEIRDIIIFYQRPLKSKKSLISVCELEQRKVKATIDGKEKEITIGPKVAPKSSPVFQEFRIWQNLNNVLLIDNDTNEKRPLDEVERNLLYKELSIKAKLSKTEALKILNKKGKQWDLNYRELEGNRTQAILFDCYNRIITLTGHEECDFKKIKASEIRHYVSTIFKNLGFSTEILDFDPSLKKHELEKQPMYQLWHLLYSYESDNSRTGNESLLRKLETTFGFPEEYATVLCDVVFEEDYGNLSVKAMREILPYLQAGNDYSQACAYAGYNHSRHSLTKEELDQKVYKERLELLPKNSLRNPVVEKILNQMINVINAIIDEYGKPDEIRIEMARELKSSAADRKKTTHAISQGNAENQRIREILEKEFSLSYISRNDIIKYKLYEELEPNYYKTLYSDTYITKDKLFSKDFDIEHIIPKARLFDDSFSNKTLEARNINLEKSNKTAFDFIKEKYGEDGAEAYKKKLDMLLENDAISRPKYNNLLRAEADIPSDFINRDLRNTQYIAKKACEILGELVKTVTPTTGKITNRLREDWQLVDVMKELNFEKYEKLGLTEIVEDRDGRKIKRIKDWTKRNDHRHHAMDALAIAFTKPSFIQYLNNLNARSNKGDSIYAIENKELHYEEGKLRFNAPIPVNEFRAEAKRHLSAILVSIKAKNKVMTQNVNKIKTKHGIIKKIQLTPRGPLHNETIYGTKMRPIIKMVKVGAALDEATINKVSSPAIREALLKRLNEYSGNAKKAFTGKNTLEKNPIYLNAGRTKTVPSLVKTVEWESFHPTRKLIDKDLNVDKVVDKGIREILKARLEEFNGDAKKAFSNLEENPIYLDEAKKIALKRVSIEGVLSAIPLHTLKNQAGKPITGKDGKPVLGNYVQTSNNHHIAFYYDEDGNLQDNAVSFFEAAERKSQGIPVIDKDYNRDKGWRFLFTMKQNEYFVFPNEATGFIPSEVDLTDEANYGIISPNLYRVQKVSRIDKGTSASRDYWFRHHLETILNDDAKLKNLAFKRIRGLLELKDIIKVRINSTGKIVAVGEYD

SEQ ID NO: 610 - protein, 1404 aa, Elizabethkingia meningoseptica
MEKTLGIDLGTNSIGWTIRNTDLSDNQIEDCGVITFEKGVASEKGNEFPKVQKRTESRGKRRNYQSEKYRKFALLDFLIQKNMCPLTIEEFDCWKNYRKGNKREYPQSEEFLQWIRFDFDGDGLPDFHLFGKDKNESYYIFRASVVDNNYKSVFDTNPHILGRILYQMVQRRGFKGRDEEEAKTMLTGSEKNGTKGRNDIAEYIEKYITVGAALYHYQKDFGGRIRQRYNLRKDYEHELKVICDVHNISQADYEKLWKAIIWQRPLRTQKGLIGNCIYEKNKKRVAVSHPLYEEYRTWVFINNLNILPPQGECLQEYLLDKIYPIFYKSKPDFELSDIDKQLKKDGAKRTSRHNEKTKVLSNKLLKQFQDIFGEDWKEELQWNITGDRSPQQNKREESLYTFEDIWHVLMTFDGQENLKKFAVEKLNLDEEKATKFSKIKLQQGFATLSLSAIKKILPYLQKGFLYNHSVYMANLYKMLDGAAISETLINHFSEEILKVLKSDSFNRKNAAIVNSLISEMLNDDNRYYISDNRDLDRSEYKTVLKNIIDTYGVEKWESFNEQQKTEITDFVSGKYLEFLKKTYSDKRNLFVQPERIHDKIFAFLQNTYHVSEDKKKYLWHPSEQENYAKADEYSEYSVGSKKYYVKAENVNHFLQRNPDAEAEGRQIKLLGNPEPLSKGFKNPMALKSLYKLKNLVNYLLQTGKIDEETRVVVEIARELNDKNKRKAIEIWQKDREKENESYRKELQTYREQFPHINLIDENTLIRKIRLWHEQNKICLYTGKPIPFSELITGNKYDIEHTIPASISFDNELKNLTISDSVYNRLHKGKRFPTQLSNYDSEQIINGETCNAIIRNIEFIFGERTVEYKEIKGKTEKIVKWRKIDELEKQFDEWKKKASYASTKEIKDNYIVKYHALKMDLDYLKEKLATFTITEYTAGWRNNQIRDTQIITKYALPYFKTLFKKVSVEKGSVTDIFKKVYKVQLRNDKKNRGVHSHHAQDAAILTLIPTAFHRERIIKAYQNEIDNRTGKTYHELPMDWDNFSEKYILDIKGNVLINNLTDNRTITQTYKTVRKRGKVVYDTDKEGSSHKRVSKGDTIRGQLHGETFYGAIKQPLRDEDNKILFDENKKMILKDEIYLAVRKPLVYKKDANSPGFKTLEEVEKVIVDKALFEMIKKQVEASDFKTALTDGIYMLDENGNKVNKIRRIRCFETGLKYTTAIKVHQHSFASGKEYKKSTLATNGENTYCLFYKNDMGKAMRILSIVDLAELKLKTIQSLYNEPEYGNFESGKGKNKYQIPLYTILKSGDKVLFYKENIYELKDLEQKELSDRMFKMYQFEKDGRIKFRHHLVAGIDTELKKDNQEYSSVNFEEKQVFLRLSQGQWNFAIEGKDFEMAFDGKINWKM

SEQ ID NO: 611 - protein, 1130 aa, Corynebacterium pseudodiphtheriticum
MNLSKRRLVSGGECSSRAFGPGFFIPERLWAMPVNYRVGIDVGTHSFGCAAIEVDDNDQPIQILSAVSLIHDSGIDPDQNKSATTRLATSGVARRTRRLYRRRRHRTIKLEKFLRSQGWKTKEFEHYSDPYLPWKTRVALVNGFIADETQRGEYLSIALRHIANHRGWRNPYWKVSSLYSPDAPSDAFEEIRKELEAKTKRKIPHDVTVGQLISFAQFGQDRLRGGGKKKDEKKSAGEFKQAVISARLHQVDHAREINEICRVQKINDTLRKQILDLVFAAESPKGAQSGRVGKDPLQPGKYRALKASDAFQRYRIAALIGNLRILHEGAIRRLYDNERHIIFEYLVNLAPKTEPSWLEIADLLNIDRGQLRGTATMTDDGERAGAKPPVHDTNRTILGCKVKPLAQWWKNASEPERAAMLKALSNAEVDDFDSPAGAQVQAFFAELDEKEHEKLDSLHLPMGRAAYSEDTLVRLTKRMNQENLDLYDARRAEFGIAEDWAPPAPRIGEPVGNPAVDRVLKGVARWLEAAADEWGAPKSVVIEHVRDGFISESKAREIDRENDKRHQHNEKLFREMEERLGIEGKPRSADLWRFQSVQRQNCQCAYCGSPITYTNSEMDHIVPRAGEGSTNTRDNLVAVCHRCNLSKSNIPFAVWAQKVSIPGVSVKEALERTKHWSVDSGLNKTEFNNFRGKVRDRFQRTAHDEPLDARSMESVAWMANELRGRVAQRFHQENTSVSVYRGAITAEARRAAGIANKLRFIGGPGKTRLDRRHHAVDAAVVAFTRQYVAETLAIRSNKKRAAELLRDVPRWKEFTGADEKRRAAWNVWLPKVQKLASLLQVALDEDRIVVTQNIRLRVGNGRAHKETIGKLKTIRVGDAISATDIDRASSEALWCALTRDKDFDAKAGLPENPERKIRIHGTWYGADDEIEVFPVGAGAIKVRGGYAELSRFHHARIYKVPKKTGYDYCMLRVYNTDLVRHRNEDLFSVELKPQTMSVRQAEQKLRKSLAENSAEYLGWIVPNDELVVDTSRIASAQLNEVQEIYGKIHRWRLLGFDSNSRILLRPLQLSAEGLPDDANAASKEIIKGRGWRTSINGFLTGGNVAVVRRDALGRVRLTSAAHLPVSWKVD

SEQ ID NO: 612 - protein, 1319 aa, Chryseobacterium indologenes
MFSQRNNPYCELLFKIIVTNIEEKNLEVIMGIRNSDIFFISNFMWYQKLIMMIKNILGLDLGTNSIGWALIEVDENNIPIRIIAMGSRIIPLSTSDKEEFQRGLSITKNQNRTVSRTQRKGYDRKQLRRSDLKKILKKYNIFPSEELLKLPMLDLWKLRSDSANPNEDISAEQLGRILYMLNQKRGYKSARSEANSDKKDTDYVQAVKGRYAQLKDRRQTIGQYFYEELSTAFSDKNNQQYFRVKEEVYPREAYIEEFDTIINAQKDKHGFLTDKVIHQLRNEIIYFQRKLKSQKGLVSICELEGFEKTVYDKEKNKNKVVFVGPKVAPKTSPLFQLCRIWEVVNTISLKIKNPEGSKYKWGEKVPNLKQKEILADYLFKNENLSFSTLLEILELKKEDVYVNKQILKGIKGNEAYAALHNVLGDHELLNFDVSIITSDHTAILVDKKTGEILEERAGLELDASLEREPLYQFWHTIYSLKDLDECKNALIKRFGLDEDIAEKLSHIDFNKQAFGSKSNKSMRKILPFLMEGYNYSESCSLAGYNHSNSLTKDERESQITLERLELLPKNNLRQPIVEKILNQMINVVNTILEKYGKPSEIRVELARELKQSKDERNDTDLQNSRNKKLNEEIGKRLAELGLPVTKRYIQKYKFIFPSLSKNLKDAHVNNQCIYCGETFNLTEALNGDAYDVDHIVPKALLFDDSQTNKVLVHRKCNSTKTNQTAYDYITAKGEEEVRIYSERVDDWFKKGIISYSKMQRLKVSHKEYLERKKLGKETETDKKLWENFIDRQLRDTQYISRKSREILQKVCNNVTTTEGGVTAKLRNLWGWDDILMNLQMPKYKELGQTITKEWTSEHGKRKHQKEEIENWTKRDDHRHHAIDALVVACTKQGFIQRINTLNSSETKDLMIKEVEEAKIEFNEKTTLLEKYLKTQKPFTTREVMKEADKILISFKAGKKVATITKFKATGKNKETGVIVPRGALHEQSVYGKIKVIEKDKPLKYLFENPDKIVNSRIRDLVETRLSENENNSKKALSTVKKNPIFFNEEKNEILEKASCYNDATVLKYKLQNLKANQVDDIVDERVKFLVKERLTQFGSKEKEAFKDILWFNQEKQIPIITVRLFARPDANNLQIIKKDKNGKDIGFVLTGNNHHIAIYEDKDSKLVQHSCAFWHAVERKKYNIPAVIKNSADVWSLLLDKELPVLFLDKLPADELNLKFSMQQNEMFILGLSQEGFDEAIKNNDKSLLSKHLYLVWSISNNDYYFRHHLETKNTELKNIPTAKDSKRYFRFKSVGALVGINPIKVRLNHLGEITKIGE

SEQ ID NO: 613 - protein, 1099 aa, unidentified
  source 1..1099: note = Corynebacterium
MSLSYRVGIDVGTYSLGCTAIEVDDNDQPVNILSSVSLIHDSGLDPDQQKRAVTRLASSGVARRTRRLYRRRRRRMINLEKFLTSQGWETRPFEHYSDPYLPWNARVALVNGYISDDAQRGMYLSIAFRHIANHRGWRNPYWKVSSLYSPDKPSDAFEQIRKELEESTGHKIPETVTVGQLISFAQFGKDRLRGGGKKKDEKKPQEQVNQAVISARLHQIDHAREINEICRVQKIDDALRKQILDLVFAAESPKGAQIGRVGKDPLQPKLPRALKASDAFQQYRIVALAGNLRIYRDGVSTPLDRDEKLIVFNYLINLSHKEEPSWLKVAEVLNIDRGQLHGTATMTDDGERAGAAPPVHDTNRTILGCKIKPLVHWWEGANDDERAAMLKALSNSEVEDFDSPAGAQTQAFFANLDESEQEKLDSLHLPIGRAAYSEDTLMRLTSRMLDENLDLYEARLAEFDIPKDWAPPAPRIGEPVGNPAVDRVLKGVARWLEAAADEWGAPKSVVIEHVRDGFISKSKANEIDRANNARHKRNRELFKQMQENLGIDGKLRSSDLWRYQSVQRQNCQCAYCGSPITYTTCEMDHIVPRAGEGSTNTRDNLVATCHRCNLAKKNIPFAVWAAQTNIPGVSVKEALDRTRHWSEDSGMTSKDFKKFRKNVCDRLKRTVVDEPLDARSMESVAWMANELRGRVAQRFQEENTVVNVYRGELTAEARRAAGISDKLRFIDGTGKSRLDRRHHAVDAAVVAFTQNYVAETLAIRSNKKREAQLLQAAEQWKEFTGSDAEHRAAWNAWLPKMQKLAVLLQKALDEDRIAVTSNLRLRLGNGRAHEDSIGELKTIRVGDAISVTDIDRASSEALWCALTREPDFDENNGLPENPDRRIRIHGTWYDAEDDIEVFPVGAGAIKVRGGYAELSRFHHARIYKIPGKKAPVYCMLRVYNADLIRHRHEDLFSVEIKPQTMSVRQAEPKLRKALAENTAEYLGWLVTDDELVIDTSNFNTGQIAEMQSELGQVRRWRLDGFYSPSTLRLRPLQMSAEGLREDTSIGAKKIIDRPGWLPAINKLFGEGHVTVVRRDALGRARLTSNAHLPISWKAE

SEQ ID NO: 614 - protein, 1420 aa, Bifidobacterium bifidum
MSRKNYVDDYAISLDIGNASVGWSAFTPNYRLVRAKGHELIGVRLFDPADTAESRRMARTTRRRYSRRRWRLRLLDALFDQALSEIDPSFLARRKYSWVHPDDENNADCWYGSVLFDSNEQDKRFYEKYPTIYHLRKALMEDDSQHDIREIYLAIHHMVKYRGNFLVEGTLESSNAFKEDELLKLLGRITRYEMSEGEQNSDIEQDDENKLVAPANGQLADALCATRGSRSMRVDNALEALSAVNDLSREQRAIVKAIFAGLEGNKLDLAKIFVSKEFSSENKKILGIYFNKSDYEEKCVQIVDSGLLDDEEREFLDRMQGQYNAIALKQLLGRSTSVSDSKCASYDAHRANWNLIKLQLRTKENEKDINENYGILVGWKIDSGQRKSVRGESAYENMRKKANVFFKKMIETSDLSETDKNRLIHDIEEDKLFPIQRDSDNGVIPHQLHQNELKQIIKKQGKYYPFLLDAFEKDGKQINKIEGLLAFRVPYFVGPLVVPEDLQKSDNSENHWMVRKKKGEITPWNFDEMVDKDASGRKFIERLVGTDSYLLGEPTLPKNSLLYQEYEVLNELNNVRLSVRTGNHWNDKRRMRLGREEKTLLCQRLFMKGQTVTKRTAENLLRKEYGRTYELSGLSDESKFTSSLSTYGKMCRIFGEKYVNEHRDLMEKIVELQTVFEDKETLLHQLRQLEGISEADCALLVNTHYTGWGRLSRKLLTTKAGECKISDDFAPRKHSIIEIMRAEDRNLMEIITDKQLGFSDWIEQENLGAENGSSLMEVVDDLRVSPKVKRGIIQSIRLIDDISKAVGKRPSRIFLELADDIQPSGRTISRKSRLQDLYRNANLGKEFKGIADELNACSDKDLQDDRLFLYYTQLGKDMYTGEELDLDRLSSAYDIDHIIPQAVTQNDSIDNRVLVARAENARKTDSFTYMPQIADRMRNFWQILLDNGLISRVKFERLTRQNEFSEREKERFVQRSLVETRQIMKNVATLMRQRYGNSAAVIGLNAELTKEMHRYLGFSHKNRDINDYHHAQDALCVGIAGQFAANRGFFADGEVSDGAQNSYNQYLRDYLRGYREKLSAEDRKQGRAFGFIVGSMRSQDEQKRVNPRTGEVVWSEEDKDYLRKVMNYRKMLVTQKVGDDFGALYDETRYAATDPKGIKGIPFDGAKQDTSLYGGFSSAKPAYAVLIESKGKTRLVNVTMQEYSLLGDRPSDDELRKVLAKKKSEYAKANILLRHVPKMQLIRYGGGLMVIKSAGELNNAQQLWLPYEEYCYFDDLSQGKGSLEKDDLKKLLDSILGSVQCLYPWHRFTEEELADLHVAFDKLPEDEKKNVITGIVSALHADAKTANLSIVGMTGSWRRMNNKSGYTFSDEDEFIFQSPSGLFEKRVTVGELKRKAKKEVNSKYRTNEKRLPTLSGASQP

SEQ ID NO: 615 - protein, 1103 aa, Actinomyces sp.
MTEINDDLRYRVGIDVGLKSIGFCAVEVDDKDQPLRLLNSMVFIHDAGVDPNENKAAKSRKLTAGVARRTQRRTAQNRRRLAELDRVLSEELHWPLPNLEDFEDPYEPWHTRAELVDHFIEDESERLEALSIAIRHMARHRGWRNPYIKVDSLLTPMEPSEFLRGLNERVGKALGREFPEDTTPGQLISAYMSDPKYRESNGIRGDDGILQGKLHQYDNAAEIRKICEVQRLDHDVFKLLVRRVFFAKSPRGSAAGLVGHDQLPGQGKYIRAEKAHPDFQLFRIVSVLTNLRVREAGAERCLTPEELSGLTDFLLDAGLKQQVTWADLADNLGIERADLRGTARPSVDGEPALRFPPTDVTTEKIMASKVKWLKEWWKSADSERRGFMVDALSNSGGSTGDNDIDDEVAELLEQATEDEQTELEKIQLPQGRAAYSLDSLRKLTERMLTEGVDLHTARKQLFNVDDDWRPEPEPIEAPVGNPAVDRVLKQVARWLNMATDRWGEPVVINIEHTRDGLGSEKVARELLRESQRRQDLNQKNMDEMIQQLGISGKARRSALVKHQAIQRQNSMCLYCGTTIGFETAEMDHIVPRANSGSSNERSNLAAVCRTCNHQKGAVPFAVWATSGQAHAGVSLEGAIERVRAWERDPAMRPKQYAHFREEVISRLKSRKPDEEFDGRSMESVAWMAIELRTRIDGFYRKLKAESVPNIGIYRGQLTAEARKASGFESRVNLIGGKGKTRFDRRHHAMDALVIAMMNQSVSQTLALRVNMRESQRITGQEETWKNFYGKPGQASDRFEQWREGMLRAVELFNIELAKNAIPFHENVRLRVGSSKVHDDTVRKFIHAKLGEALSVAMIDRAETPALWTALTRLPDFDPKEGLPEDPSREIYIHGRKITADEQLNFFNSPSACLKVRGGYVEIGSSIHHARIYRIDGKKTTYAMVRVFATDLVKMTHEDVFTTPLKPSTISMRTAEPKIRKALADGTVTQIGWLVEGDELQIETDKYLKGFVGEVLAQYPELTSWRVAGFPDPAKLRLRPYLLSVEGLEKGSSKELSDLLEGQGWRPAINVLLASGVVSVVRRNCLGEPRSNSQNSLPITQLLR

SEQ ID NO: 616 - protein, 1399 aa, Olsenella uli
MNLRNTTDEYNIGLDMGTNSVGWAVTDKAGAIAHFKGKPTLGSRLFDAAQTAAGARIHRSQRRRYVRRRWRLDLLQSLFQDEVSKVDSEFFCRLRQSRLYVGDREKGHADYTWPIFNDSDFNEVDYYKRFPTIYHLRKWLMETDEKADIRLIYLATHNIVKHRGNFLRENNKSLSSRDANPAQAVKSLRLALNDWCSERDYECAWKGEEDDGAIDEAILNVLADGEKGRSDQAKEIAKLTGVDCGDAKQSKQCNEAIAKAIVGLKVEMKNIFGEFPAEKTSYIYLSSDEDVEAVRESCPDDSGELFQALCKLYSAYILQELLSYADPSGQTISANMVAKYKQYGRDLRLLKELTRTYAPQKYDLFFRGETYAGSSDYVVDEARGYTRYNLGTTKANYDDFQKSVKELFKGTDALQDERYQEMMVAFGEQKFLRRLKTSDNGSIYYQLHLEELHTILENQGKHYPFLLSEEDKIESLVSFRIPYYVGPLTRKNAAIGHDGKERFAWSSRKDGMEHAVITPWNWEEIIDRDKSAEDFIMRMTGDCTYLQGEPVLPKCSLLYEEFCALNEFNGAHWTVDGDDERRFDAAQRERIMCDLFRRTRSVTYNKVSDWLERKYNFTGARVRGGQGEHGFESKLGSYIFFCKDVFKTDGLDEADYTMIEQIILWSTLFEDRDILKRKIEEAYGGDRLTSEQIKVICKKRFTGWGRLSKRLLTDIKVNTDTGRKSIMDVLREGNPNNGQRSRTMVFMEVLRDEDLGFQKAIDGLNRDYFREHNNGLMDVNDLPGSPAIRRSINQAVRIVDEIASIARKEPTNIFIEVTREEDDPRKKGKRTKRRYDAIKSALEKFKKDDPSLWKELCEKAPGDMDERLSLYFMQRGKCMYSGRPIKIEELHTGKYEVDHIIPRSYIKDDSFENKVLVYREENQHKTDALLIDSSIRQKMGGYWRMLHDAKLVGDKKFRNLFRNHIDDKAMKGFVARQIVETSQMVKLVQTLFEARYPNTRIVPVKAGISHDLREAAGLVKCREANDFHHAHDAFLACRIGLFIQKRHPSVYDNPIGLARIMRDYARMQAREYKKSHCLAHTQGFIVNSFLSSGFDEETGEIFKDDWDAKAEVEGIRRVLNCRQCFISRMPVEGDTRYGGRYWGETIYSPKGKHKHEIPLKQGLDPNLYGGYSDLLYSYFLIYEASDVSSGERVLRFIGIPTSIAARMANQKRLEEYVSRLALQENLEHVRMVRKIMKKQLIEVDNCRLLVTAADAVTNATELAFSLDEMKIISTCAKCINGADPSAIDKIGNAQDSFFDNLKRRGSDRCALLFSQLKLDKLSQNFYMISSDDKSKILISILDRIRAKSNSVDLSLVGGAKHAAQMKFDFNAKLNNPASSFVLIDQSVTGMFERRTRIGL

SEQ ID NO: 617 - protein, 1391 aa, Lactobacillus melliventris
MKKRIDDYILGLDIGTNSCGWAVTDKKNNLLKLRGKTAIGSHLFEEGHTAADRRGFRTTRRRLKRRKWRLRLLEEIFAEPMAEVDPGFFVRLHQSWVSPLDKSRKKYQAIVFPTAKEDQEYYQKYPTIYHLRDALMTQDRQFDLREIFLAIHHIVKYRGNFLQDTAVKDFEASKIEVGPILTNINNAFADKIVEGQDLIELNVANAAEIEAVIRGKDADKTLYKMDKVKKIAKLLTDSTAKEQKNVAKQIANAIMGYKTQLETILGKEIDKNDKAQWEFKLSDADDKLDALLPDLDESDQTVVAEIEKLFSAITLSTIVDENKSLSQSMVEKYNKHHQDYKLLKAYIESLPDRAQAKKLLLAYDLYVNNRHGHLLEAKTEFKQDSTLTKEDFYKTVKDNLDDSELAHKIAQEIAADNFMPKQRTNSNGVIPFQLHQIELDKIIANQSKYYPFLAAENPVEDHRKQAPYKLDELVRFRVPYYVGPMITADEQEKTSGKSFAWMVRKEQGQITPWNFEQKVDRQESANKFIKRMTIKDTYLLGEDVLPANSLLYQRFEVLNELNNIRVNGSRISVDLKQQIFNDLFEEKKTVTEKALISYLKQNLHLPTVEIKGLADPTKFNSSLASYYHLKNLHVFDKELADPQYQKEFEKIIEYSSIFEDKKIFQDKLHAEFKWLTPAQFKAISTWRLQGWGRLSRKLLVELHDTNGQNIIEQLWDSQKNFMQIVTEPDFKEAIAKENQNITQENGVEEILADAYTSPANKKAIRQVVKVVADVVKAASGKAPAQFAIEFTRDPDKNPQLSHIRGTKLLKAYQETAGELVDQNLTNSLKEAMTSRKLLKDKYFLYFMQTGRDAYTGKKINIDEVSTNYQIDHILPQSFIKDDSFDNRVLTATPLNAEKSDDVPYKRFANNYVSDLKMTVGEMWKHWQKAGIINKHKLGNLLLDPDRLSKFQKSGFINRQLVETSQIVKLVSVILQNKYPDAEIITVKAGDNSALRQRLDLYKSRDVNDYHHAIDAYLSIVCGNFLYQVYPKYRPYFVYGQFKKFSQDPDLQKDLIKHFKGFTFMWPLLQKDNSERKALEEIKENNSDRIVFYKHPDIFDKLRKAYNYKYMLVSRETSTESSSMFNMTIYPRGERDRKKTRKLIPKGNGLDPKIYGGYSGNTDAYMVIVKIEKAKESIYKVIGIPMRALAGLKQAKNQGNYKEELHKVVEPQIMLDKNGKPKRGVEGFRVVKDHVPFKQVVLDGDKKFMLYSAKYETNAKQLTLSQETMRIVTDNLKKSEDQDKLLVKAYDEILQKVDQYLPLFDVNKFRNSLHLGRAKFLDLAVNDKKITLSNILNGLHDNLVVPNLKNIGIKTPFGLMQSPSGITLSSNAILIFQSPTGLFEKRVRIADL

SEQ ID NO: 618 - protein, 1057 aa, Skermanella aerolata
MSNRVPYRLALDLGTNSIGWCLLDLNGNGDPCGVRRMGVRIFPDGRDPKSKESLAADRRLARSMRRRRDRYLRRRSALMNALVAAGLMPADRATRKALESEDPCELRARALFEPLTAGQVGRALFHLNQRRGFKSNRKAAGEENEAGKIKAGISALKAEIEASGETTLGAWLAARHRKRETVRARLDGAGAKASYEFYPERGLVHDEFQAIRTAQALHHPAVTAEQWDRVESVIFRQRPLRPVRPGKCTLFPDQERAPWALPVAQEFRILTEIGNLKLYRPGEEPRELSADQHAQLFAKLCRSADLTFEKIRKELKLDPGLKVNLEGEKRDRLKGDAVTSALSAKKRFGPKWNALTPDDRRDIVGRLIEAEDEAELAGWLESVHGLPSENAAHTAASPGLPDGYCRLSEKALVKLVPLMREQRLRYDEAVLALNLHHSDFRPEGLLDELPYYGEPLERFIAFGSGEPSDPPEQHLGRFPNPTVHIGLNELRKLVNRIVERWGKPADIVVELARDLKRSRDERDTIQREQAQNQRKNEDRFAKIKELGIDPRPDSMLRLRLWEELPKVGVGHVCVYTGEPIGIRRLLEGDVDIDHILPFSRTLSDGADNKIVCVRRANRFKRDRSPWEAFGVTAVDGYDWAAIAQRAEELPKNKRWRFLPDAMDRFEGERGFLDRQLVETRHLSRVARQYLASIVDLNKVRVAPGKLTAMLRARWGLNKILSDGNLKNRSDHRHHAIDAAVLGMIDQRLVQLVAQAAARAEANELERLFDGLPDPFDGLAATSFGDQVREKIRGITVSHRAEHGWQGRMHNDTAYGPVEAVNGVHTVVTRKPLSGLTAKDFPNIRDRVLAKALEDHVAAEAAAGRSFGDALGSFKWGGQPVRRVRMLDVLGNPIPIQDPSGTVFKVYKGDSNAWYEILRDPRGRWTGKIVSTFEAYRLHREWLAETGGDSGRGSGVFLDWAAKRVVGEAGTPLFRLFKGDLLALGEAPDRRIVRVVKFSEGQVALALHLEAGNLKARDADKGDPFKYQYCSPDSLRKQAARPAGVDLLGYVHDKGPLE

SEQ ID NO: 619 - protein, 1021 aa, Ruminiclostridium cellulolyticum
MKYTLGLDVGIASVGWAVIDKDNNKIIDLGVRCFDKAEESKTGESLATARRIARGMRRRISRRSQRLRLVKKLFVQYEIIKDSSEFNRIFDTSRDGWKDPWELRYNALSRILKPYELVQVLTHITKRRGFKSNRKEDLSTTKEGVVITSIKNNSEMLRTKNYRTIGEMIFMETPENSNKRNKVDEYIHTIAREDLLNEIKYIFSIQRKLGSPFVTEKLEHDFLNIWEFQRPFASGDSILSKVGKCTLLKEELRAPTSCYTSEYFGLLQSINNLVLVEDNNTLTLNNDQRAKIIEYAHFKNEIKYSEIRKLLDIEPEILFKAHNLTHKNPSGNNESKKFYEMKSYHKLKSTLPTDIWGKLHSNKESLDNLFYCLTVYKNDNEIKDYLQANNLDYLIEYIAKLPTFNKFKHLSLVAMKRIIPFMEKGYKYSDACNMAELDFTGSSKLEKCNKLTVEPIIENVTNPVVIRALTQARKVINAIIQKYGLPYMVNIELAREAGMTRQDRDNLKKEHENNRKAREKISDLIRQNGRVASGLDILKWRLWEDQGGRCAYSGKPIPVCDLLNDSLTQIDHIYPYSRSMDDSYMNKVLVLTDENQNKRSYTPYEVWGSTEKWEDFEARIYSMHLPQSKEKRLLNRNFITKDLDSFISRNLNDTRYISRFLKNYIESYLQFSNDSPKSCVVCVNGQCTAQLRSRWGLNKNREESDLHHALDAAVIACADRKIIKEITNYYNERENHNYKVKYPLPWHSFRQDLMETLAGVFISRAPRRKITGPAHDETIRSPKHFNKGLTSVKIPLTTVTLEKLETMVKNTKGGISDKAVYNVLKNRLIEHNNKPLKAFAEKIYKPLKNGTNGAIIRSIRVETPSYTGVFRNEGKGISDNSLMVRVDVFKKKDKYYLVPIYVAHMIKKELPSKAIVPLKPESQWELIDSTHEFLFSLYQNDYLVIKTKKGITEGYYRSCHRGTGSLSLMPHFANNKNVKIDIGVRTAISIEKYNVDILGNKSIVKGEPRRGMEKYNSFKSN

SEQ ID NO: 620 - protein, 1274 aa, Pedobacter glucosidilyticus
MTKHILGLDLGTNSIGWAIIQVDNNNNVPIQIIAMGSRIIPLDSNDRDQFQKGQAISKNKDRTTARTQRKGYDRKQLKKSDDFKYSLKKILEKLDIFPTEELMKLPTLDLWKLRSDAVSNIEDITPKQLGRILYMLNQKRGYKSARSEANADKKDTDYVAEVKGRYTQLKDKGQTLGQYFYKELSDANQNNTYYRVKEKVYPREAYIEEFDAIINVQKSKHSFLTDEVIHSLRNEIIYYQRKLKSQKGLVSICEFEGFETTYFDKKTQQDKTIFTGPKVAPRTSPLFQFCKIWEVVNNISLKTKNPEGSKYKWSDRIPTIEEKQTIANYLQENENLSFIELLKILQLKKEQVYANKQILKGIQGNTTFSAIHKIIGNSEHLKFDIETIPSKHFAVLVDKKTGEILDERDSLELNSALEQEPFYQLWHTIYSIKDLDECKKALIKRFNFEEEIAEKLSKIDFNKQAFGNKSNKAMRKMLPYLMLGYNQSEAESFAGYNRRLTKEEKSKNVSDEPLQLLAKNSLRQPVVEKILNQMINVVNAIIEKYGKPEEIRVELARELKQSKDEREDADKQNGFNKKLNELVATKLTELGLPTTKHYIQKYKFIFPAKDKNWKEAQVANQCIYCGDTFNLTEALSGDNFDVDHIVPKALLFDDSQANKVLVHRSCNSTKTNNTAYDYITKKGSQALNDYVARVDDWFKRGIISYGKMQRLKVSFEEYQERKKIGKETEADKRIWENFIDRQLRETAYIAKKAKEILEKVCHNVTSTEGNVTAKLRQLWGWDNVLMNLQLPKYKELEKKTKQTFTQLKEWTSDHGNRKHQKEEIINWTKRDDHRHHAIDALVIACTQQGFIQRINTLSSSDVKDEMKKELEEDKTVYNERLTLLENYLLEKKPFSTEEIEKEADKILVSFKAGKKVATLSKYKATGINEIKGVLVPRGPLHEQSVYGKIKVIEKDKPLKYLFENSDKIVNPLIKHLVKTRLLENENNAQAALVTLKNKPILLNNKQTEILEKASCYNEATVLKYKLQSLKASQIDDIVDEKIKFLIKERLSKFGNKEKEAFKDILWFNEKKQIPITSIRLFARPDANNLQVIKKHEKGKNIGFVLSGNNHHIAIYEDKNNKLIQHICDFWHAVERKRNNIPVLIEDTSTIWNHLINEDFSESFLNKLPNDSLKLKFSLQQNEMFILGLPKEQSEEAIKSNNKSLLSKHLYLVWSITDGDYFFRHHLETKNTELKKIDGSKESKRYLRLSTKSLVDLNPIKVRLNHLGEITKIGE

SEQ ID NO: 621 - protein, 1485 aa, Prevotella bivia
MKNILGLDLGTNSIGWAKISIDDNGKYIKDSIKLGSRIIPMSQDVLSNFSKGVTLSQTSERTSFRGARRLRERTLLRRERLHRILHLLGFLPKHYEKAIGWDRNDNKTYGKFINHAEPKLAWCKDNNGKMRFLFMDSFHDMLSEFSEKHPELLANGKKIPLDWTIYYLRKKALYKAITKEELAWILLNFNQKRGYYQLRGEEDRDSEANKKEYLELKVIGVEATGEKKGNDIWYNIHLENGWIYRRSSKNPLNDWLGKVKSFIVTTDLDADGNPKKDKDGNIKRSLRAPSEGDWTLIKKRTESLLENSGQTVGQFIYNHILEEPSAKIRGNFIRTIERKYYKDELKAILEKQKEFHHELSSESLLTECAKELYKRNIAHQEVLLKKGIIHLLLNDILFYQRPLKIKKSLIDNCPYENYKYVDKKSGDIKVKSIKCIAKSNPFFQEFRLWQFVSNLRLYRKSDDKDVTSEHLVTTDDYANLFTYLNNRKDIKQSVLLKEYFKIKKVKTINGAEYPVRWNYIDDDNKTYPCNETRYDILHTLSKTELKSEWLTPERTYRLWHLLYSIESKEETKKALNKLNLSDDFTEAFLTIKPFKKEYGSYSEKAIKKLLSLMRMGYLWSEDEAIKQVGAEIEKTIEGELPDYVLQRLEKSQHNYNKISDFSGLPLWLASYIIYGRHSEAKEIIHWDNPESMMAYIKDFRQHSMRNPIVEQCVLETLRTVHDIWKEIGHIDEIHIELGREMKSTSEQRKAITQNVLHNQNTNIRIKLLLQELKNDNNITGVRPYSPMQQEILRIYEEGALQGLTKEDKDYNDILKISQTAQPTSNELTRYKLWLEQKYRSPYTGKAISLSKLFTSAYQIEHVIPQSRYFDDSLSNKVICESEVNTLKKAMLGMEFIKTCGGQKVHCTLLGDVEIYNEEDYKAFVNEHYSNNRTKRNKLLMEDIPQEFINRQLNDSRYISKMVKQLLSAIVRGQEEVEATSKFVIPCTGGITDRLKKDWGLNDIWNNLVSPRFQRMNALTGSEDFGHWENKEGKRVFQTTMPIQLQQGFSKKRIDHRHHAMDALVIACASRNIISYLNNETAQDTERRRDLRQKLCDKGGSVRKPWDSFTQDTQYALKDIIVTFKNYVRIINKATNYYEHYKTDGKKGMISQKGDELWAIRKPMHKETVFGKVNLRRPKRVSLSKAIDSVDVICNRKLKKYIKARLNEGLQKKQILNIFKELNNVWEGIDVNKIDIWEMSNDKEPMVATRKQLDTSFDEKKIRSISDTGIQKILLNYLITKNNNPELAFTPEGIQEMNSNISEYNDHKEHQPIYKVRVTEPLGAKYPIGTMGNKPKKFVEAQAGTNLYFAIYEDKEGNRNYDTIPLNIAAERLNQQLSPVPETNENNIPLKFYLSPNDLVYVPSEEERHSGNNIQLDKNRIYKMVSSTSKQCFFIHHRVAISLVDKKEFSAQNKMERSIDNEQVMIKSVCWKLITDRLGNIIKVIK

SEQ ID NO: 622 - protein, 1203 aa, Bifidobacterium longum
MPQGLTGHSGHTFWPTSSSPPIQLEQEKRPLPQRNTSQNGHTFWPITRERCFMRGKRYRIGIDVGLNSVGLAAVEVSDENSPVRLLNAQSVIHDGGVDPQKNKEAITRKNMSGVARRTRRMRRRKRERLHKLDMLLGKFGYPVIEPESLDKPFEEWHVRAELATRYIEDDELRRESISIALRHMARHRGWRNPYRQVDSLISDNPYSKQYGELKEKAKAYNDDATAAEEESTPAQLVVAMLDAGYAEAPRLRWRTGSKKPDAEGYLPVRLMQEDNANELKQIFRVQRVPADEWKPLFRSVFYAVSPKGSAEQRVGQDPLAPEQARALKASLAFQEYRIANVITNLRIKDASAELRKLTVDEKQSIYDQLVSPSSEDITWSDLCDFLGFKRSQLKGVGSLTEDGEERISSRPPRLTSVQRIYESDNKIRKPLVAWWKSASDNEHEAMIRLLSNTVDIDKVREDVAYASAIEFIDGLDDDALTKLDSVDLPSGRAAYSVETLQKLTRQMLTTDDDLHEARKTLFNVTDSWRPPADPIGEPLGNPSVDRVLKNVNRYLMNCQQRWGNPVSVNIEHVRSSFSSVAFARKDKREYEKNNEKRSIFRSSLSEQLRADEQMEKVRESDLRRLEAIQRQNGQCLYCGRTITFRTCEMDHIVPRKGVGSTNTRTNFAAVCAECNRMKSNTPFAIWARSEDAQTRGVSLAEAKKRVTMFTFNPKSYAPREVKAFKQAVIARLQQTEDDAAIDNRSIESVAWMADELHRRIDWYFNAKQYVNSASIDDAEAETMKTTVSVFQGRVTASARRAAGIEGKIHFIGQQSKTRLDRRHHAVDASVIAMMNTAAAQTLMERESLRESQRLIGLMPGERSWKEYPYEGTSRYESFHLWLDNMDVLLELLNDALDNDRIAVMQSQRYVLGNSIAHDATIHPLEKVPLGSAMSADLIRRASTPALWCALTRLPDYDEKEGLPEDSHREIRVHDTRYSADDEMGFFASQAAQIAVQEGSADIGSAIHHARVYRCWKTNAKGVRKYFYGMIRVFQTDLLRACHDDLFTVPLPPQSISMRYGEPRVVQALQSGNAQYLGSLVVGDEIEMDFSSLDVDGQIGEYLQFFSQFSGGNLAWKHWVVDGFFNQTQLRIRPRYLAAEGLAKAFSDDVVPDGVQKIVTKQGWLPPVNTASKTAVRIVRRNAFGEPRLSSAHHMPCSWQWRHE

SEQ ID NO: 623 - protein, 1398 aa, Streptococcus equinus
MEKSYSIGLDIGTNSVGWSVITDDYKVPAKKMRVLGNTDKKYIKKNLLGALLFDSGETAEATRLKRTARRRYTRRKNRLRYLQEIFAKEMAKVDESFFQRLDESFLTDDDKTFDSHPIFGNKAEEDAYHQKFPTIYHLRKHLADSQEKADLRLIYLALAHMIKFRGHFLYDNFNDDNFDWRNIDIQKRYEEFIETYDSTLGESYLADISVDAASILEEKVSKTERLENLLKYYPTEKKTTFFGNLIKLILGQQAKFKAIFNLEDEISLQFATPTYDEDLEELLGKIDNGDSYSELFVAAQNLYNTILLASFLKTDNKSAKAPLSTSMIERYENHKKDLAKLKDFVKKNCPDQYHDIFRDKSKNGYAGYIDNGVSQNDFYTFIGKCLEESLKKDKGAQYFLDKIDRDDFLRKQRTFDNGAFPYQIHLQEMHAILRRQGDYYPFLKENQDKIEKILTFRIPYYVGPLARKDSRFAWANYRSDEAITPWNFDEVVDKEKSAEKFITRMTLNDLYLPEEKVLPKHSLIYETFTVYNELTNIKYVNDQGNAIHFDSELKEKIFNQLFKENRKVSKKTLIDFLNNSEGIYTDKLVGIDEEVKYLNASLGTYHDLKKILESFMDDEINEKIIEDIIQTLTLFEDIEMKRQRLQKYDDIFTPKQLKELARRNYTGWGRLSYKLINGIRNKENNKTILDYLKNGNRNFMQLINDDRLSFKQIIIDARKIEKLDNIESVVYNLPGSPAIKKGILQSIKIVDELVKVMGHNPDNIVIEMARENQTTNQGKNRSQQRLKRLQDSMSNFKDSSISLKDVDNSDLQNDRLFLYYIQNGKDMYTGEELDIDHLSDYDIDHIIPQSFIKDNSIDNRVLTSSAKNRGKSDDVPGRDVVLKMKPFWKKLYDVKLISKRKFDNLTKSEHGGLTESDKAGFIKRQLVETRQITKYVAQILDGRFNTKRDDNNKVIRDVKVITLKSSLVSQFRKDFGFYKVREINDYHHAHDAYLNAVVGTAILKKYPKLAPEFVYGEYKKCDVRKLIAKSGDKSEIGKATAKYFFYSNLMNFFKRVIRYSNGMIVVRPVIEYSKDTGEIAWDKEKDFKTVCKVLSCPQVNIVKKVEKQSHGLDRGKPKGFYNANPSPKPKKGSKVNLVPIKANLNPKNYGGYAGISNSYAVLVDATIEKGAKKKLTRIQEFQGISIIDREKYEKNKVEFLKGLGYKEIYSIITLPKYSLFELADGSRRMLASILSTNNKRGEIHKGNELVLPAKYIPLLYHANRIHNTFETGHREYVEKHIAEFKEIAEIILEFNNKYVNAKKNSSIIEKALESFDSFSLDEICDSFVGKLKKNNTKKNSGLFELVSLGSASDFEFLETKVPRYRDYTPSSLLNATLIHQSITGLYETRIDLSKLGEE

SEQ ID NO: 624 - protein, 1375 aa, Streptococcus canis
MEKKYSIGLDIGTNSVGWAVITDDYKVPSKKFKVLGNTNRKSIKKNLMGALLFDSGETAEATRLKRTARRRYTRRKNRIRYLQEIFANEMAKLDDSFFQRLEESFLVEEDKKNERHPIFGNLADEVAYHRNYPTIYHLRKKLADSPEKADLRLIYLALAHIIKFRGHFLIEGKLNAENSDVAKLFYQLIQTYNQLFEESPLDEIEVDAKGILSARLSKSKRLEKLIAVFPNEKKNGLFGNIIALALGLTPNFKSNFDLTEDAKLQLSKDTYDDDLDELLGQIGDQYADLFSAAKNLSDAILLSDILRSNSEVTKAPLSASMVKRYDEHHQDLALLKTLVRQQFPEKYAEIFKDDTKNGYAGYVGIGIKHRKRTTKLATQEEFYKFIKPILEKMDGAEELLAKLNRDDLLRKQRTFDNGSIPHQIHLKELHAILRRQEEFYPFLKENREKIEKILTFRIPYYVGPLARGNSRFAWLTRKSEEAITPWNFEEVVDKGASAQSFIERMTNFDEQLPNKKVLPKHSLLYEYFTVYNELTKVKYVTERMRKPEFLSGEQKKAIVDLLFKTNRKVTVKQLKEDYFKKIECFDSVEIIGVEDRFNASLGTYHDLLKIIKDKDFLDNEENEDILEDIVLTLTLFEDREMIEERLKTYAHLFDDKVMKQLKRRHYTGWGRLSRKMINGIRDKQSGKTILDFLKSDGFSNRNFMQLIHDDSLTFKEEIEKAQVSGQGDSLHEQIADLAGSPAIKKGILQTVKIVDELVKVMGHKPENIVIEMARENQTTTKGLQQSRERKKRIEEGIKELESQILKENPVENTQLQNEKLYLYYLQNGRDMYVDQELDINRLSDYDVDHIVPQSFIKDDSIDNKVLTRSVENRGKSDNVPSEEVVKKMKNYWRQLLNAKLITQRKFDNLTKAERGGLSEADKAGFIKRQLVETRQITKHVARILDSRMNTKRDKNDKPIREVKVITLKSKLVSDFRKDFQLYKVRDINNYHHAHDAYLNAVVGTALIKKYPKLESEFVYGDYKVYDVRKMIAKSEQEIGKATAKRFFYSNIMNFFKTEVKLANGEIRKRPLIETNGETGEVVWNKEKDFATVRKVLAMPQVNIVKKTEVQTGGFSKESILSKRESAKLIPRKKGWDTRKYGGFGSPTVAYSILVVAKVEKGKAKKLKSVKVLVGITIMEKGSYEKDPIGFLEAKGYKDIKKELIFKLPKYSLFELENGRRRMLASATELQKANELVLPQHLVRLLYYTQNISATTGSNNLGYIEQHREEFKEIFEKIIDFSEKYILKNKVNSNLKSSFDEQFAVSDSILLSNSFVSLLKYTSFGASGGFTFLDLDVKQGRLRYQTVTEVLDATLIYQSITGLYETRTDLSQLGGD

SEQ ID NO: 625 - protein, 1362 aa, Eubacterium ramulus
MGTDSLGWAVTDSSYHILRAKGKDLWGVRLFPSAETSVERRTYRVNRRRRQREVARIGALKELFADEIEKVDPGFFVRLDESKFHMEDRSENNKQKYGLFADKLFSDAGYYKKYPTIFHLRKELLESEEPHDVRLVYLALLNMFKHRGHFLNSSLQIEGENSNIAESYQMFVDTLTDEDLDFPEQVSGERLQEIFRSSDSRKKKVENLLAEMNLSKKQKREIQFVNLICGLKGKLSELFPDKEYDEEQKKIAFSFQDSDYEDKENTIQELLDESEMNMIYAVKAVHDSGVLSGIMNGERYLSVARVASYEKHKKDLQILKDILKKYDTKEYFEMFRNESAKSESYSAYVGSVKYHGTFRRGLSGGKQEDLYKHIKKVLGKFPQDDEGVTYILEEIETESFLPKQLTASNGVIPNQVHAREMLAILKHAELYLPFLQEKDDTGLSVSEKILKLFMFQIPYYVGPLGQEYKDKKGYNVWAERKASGKIYPWNFEDKIDVKKSAEKFIGRMVRRCTYLSGEQALPKQSLLYEKFQVLNELNNLRIRGEKIPVSLKQEIYHDLFGDGKKVSMTRLTNYLLQNGVISGEEKDSCISGIDGGFHNSLSSVGKFKGVFGDTVHTDEHRKMIEDIIFWGTVFGDGKKLLKEKVEEVYGNQLTEAQKKRIFGFKFSSWGRLSKAFLTMEGASKDDGEIKGLIQAMWDTNCNLMELLSDRFTYKDKLNEMVTTAEKPLCEWKIEDLDEMYLSAPVKRMVWQTIRVVDEVQQIIGCPPKRIFVEMTRSDGEKGKRTVSRQKKLVDLYKALGKEGKTWSEELSDTPESQFRIKKLYLYYLQMGKCMYTGEAIELEQLMNDNLYDIDHIYPRHFIKDDNISNNLVLVKKEKNAHKSDSFPIEPEIRNKMMPFWKSLRKKGFLTEEKYNRLTRMSAFTDEEKAAFIGRQLVETSQGTKAITQIFEQAFANSEIVFSKASVVSAFRQKFDCYKVRCVNNYHHAHDAYLNIVAGNTYRVKFTSNPLNFIKEAKKNPNSRENRYNMDKIFEWDVTRNGETAWVAQTKEHPGTIQLVKKYLNKNSPLITKMVYEKHGGITQKATIWSAKKAESGNTDAYIPVKMNDPRLADVTKYGGVTTIAVAGYTLLEYKAGGKTVRSLEALPIYLGGSKKLTEEQMVEYFSNVLQQENKEKVVSDVIIRKKMIPSGSLIKYNGFYYYLAGKTGDRIILISAVQLCLPMDTMLYIKKIEKACSTGNFEEKDKNGKQVLSKQQNEFVYELIIQKYQQSIFKKKVGAIGDTIIEKREKFAEISLEEQCKVLMQIFLNFQSGIGVELKIIEGGKKSGVTYLNKKVMNVQELKLIDQSVTGVFSREIDLLTI

SEQ ID NO: 626 - protein, 1509 aa, Bacteroides fluxus
MKTILGLDLGTNSVGWAVINSVIKEQAERIWIEMAGSRIIPMDAAVLGDFDKGNSISQTSERTRLRGVRRLRERQLLRRERLHKVLNILGFLPNHYLEYIDFEKHPGKFLSDAEPKLPWVKDEQGKYTFLFQAAFDEMLADFAIHQPSLVSGDKKIPYDWTIYYLRKKALTEMISKEELAWILLNFNQKRGYYQLRGEEEEDNAGKSVEFYALKVLTVEATDEKKGRDVWYNVHLENGWIYRRSSSVPLDWEGQIKEFIVTTDLNPDSTPKLDKYGEVKRSFRAPKEDDWMLIKKRTEADIANTHKTVGAYIYDTLLQKPQQKIIGKLVKTVERKLYRDELSLILQKQCAFHAELQDRTLYARCVEALYPNNEVQRRNIANRDFVYLLMDDVLFYQRPLKTKKSLIANCPYEENEYVDRETGEIKKAPLKCIAKSHPLFQEFRLWNFLSNIRIYQKEKEINGTLHLDVDVTAEFLKTEDDYVALFDWLNSRKEIEQKTFLKYPKFGLKKEISNYRWNYVEDKQYPCNETRHAILSRLEKANVCIDFLSNEKEVALWHILYSVSDKQEIEKALRTFAAKNGLDESFVEAFKKFPPFKSEYGAYSAKAIKKLLPLMRCGKYWDVSSIDDTTKERIKKIVAGEYDERIAVKVRDKVMNLSDISCFKRLPLWLACYIVYNRHSEDKEAVKWESPADIDAYLASFKQHSLRNPIVEQVITETLRVVRDIWKQVGRIDEIHIELGREMKNPADKRKRMTAQILENENANLRIKALLAEFMNPEYEIENVRPYSPSQQEILRIYEDMVLHAEDQLPEEIDAILKKFNSSKVPTKSEFLRYKLWLEQKYRSPYTGELIPLGKLFTAAYEIEHVIPQSRYFDDSFSNKVICESAVNKLKDNQLGYEFIKNHHGQKVEVGFGKSVEIFSVDSYERFVKEQYAKSAVKMKKMLMDDIPEQFIERQLNDSRYISKVIKGLLSNIVREKNDSGEYEPEAVSKNIVVCTGSVTDRLKRDWGMNDVWNSIVYPRFERLNSLTDTQSFGHWENKSGKKVFQTELPLEYQKGFSKKRIDHRHHAMDAIVIACATRNHVNYLSNESASRNAKISRYDLQRLLCDKSRTDDNGNYKWVIKKPWDTFTQDAREVLSKIVVSLKQNLRIINKTTNVYRHLDATGNRVYEKQKTGDSWAIRKPMHKDTVFGAVNLRKVKVVRLSVALDAPTMIVDKRVKNKVFELLSYKYDKKRIEKYFKENAVLWKELDLARVAVYYFTEATTEPLVAVRKPLDSTFNEKKIKESVTDTGIQKILLNHLCTKEGKPDLAFSAEGIEEMNRNLLQLNNGKRHQPIYKVRVYEPRGNKFSVGVLGNKGTKWVEAAKGTNLFFAIYITEDGKRTYETIPLNMVIEREKQGLAPVPDKNEKGDKLLFWLSPNDLVYLPTEEELEFGRINEPIDRGRIYKMVSSSGNQCFFIPQSISNAIIPTKELGANNKAERSWDGAMIKNICIPVKVDRLGRIIEVKYRINE

SEQ ID NO: 627 - protein, 1391 aa, Prevotella oralis
MKKILGLDLGTTSIGWALVNEKENNEELSSIIRLGVRVNPLTVDEKSNFEKGKDITTNADRTKCRSARRNLQRFKLRREALADCLKRHGLMTDETPLCETNNSIIFKTYSNRAKAVCEKIALDDFVRVLFMINKKRGYKSSRKLNTDDEGTLVDGMDVAKLLYNEQITPGEYLLRLFKKGKKTRPDFYLSDLKAELERIWDFQRTFYPEILCNALKEDLKGKSRTQSSAIFYAKYKVSTAKIAGKDKRLQELTWRTDALRKQLTIDEVAYVICSINGEVNGSSQRLSMISDRSKLLYFNHQTIGQYLMQRLEENPNAGLKNIIFYRQDYEDEFNDIWNSQATYHKELTPELKKEVKDIIFYQRGLKSCKWLINYCELEHEEIEVKTPEGKLRKITIGSKTCPKSSPLFQEFKIWQVLNNLQVSPLNSRRKAKRKKDEEPSLFSDEDMNTACRYLNEEEKLTLFKELSIKKELKKKDALKLLFENYKELDLNYKVISGNVTMANLYRAFQDIISLTGNGEFDFQAMPAEEAEKTVEEIFGGLGYKTAFLHFDASLHDKEFERQPAYRLWHLLYSYAGDQSKTGIEALVKRIQELCGFEPEYARILANISFIPDYGNLSSKAMRKILPYMQDGYEYSEACSKAGYRHSASSLTKEEINKKNYKTHLDEIKRNSLRNPIVEKILNQMVNVVNSVIDTYSNIDEIRIEMARELKKSKPEREDMSFAISKATKETERIKGILEQEFKIQHVTRNDIIRYRLYEELKPNGYKTLYSNTYIPREDLFSKKFDIEHIIPKARLFDDSYSNKTLELRDINIEKGNQTAYDFVLSKYGEEGLYKYEQRVEEFKKNNEQAGTKCRKLLMREADIPSDFLNRDLNDSQYIAKKAHELLREIVPTVTATTGSITNRLREDWKLVNVMKELNWEKYDKLGLTEEYKDKDGNTVRHIKDWTKRNDHRHHAMDALTIAFTKPSFIQYLNNLNARSNRGGSIYGIEQKELERENNKLVFIPPIDPKIFRKQAKEHLSNILISIKAKNKVVTKNVNKTKSKSGTNRKVQLTPRGQLHLETVYGKIRTYKTEEIKVGTKLTEELIAKVADKKIREALMQRLSEYGGNIKKAFQNISKHPIWLNGSHTKHVPEKVKIVFFEDVFTIRKAITPDIKIDKVIDSKIRRILQERLNEFGGEASKAFSNLDENPIWFNRDKGIAIKSVKIRGIAKGTAIRVKKDIHGKTIIGNNGYPVANDYVNTGNNHHVAIFRDKDGNLQEHIVSFYEATARAIQNLPIVDRNYNSEKDWKFLFSMKQNEYFVFPNPNTGFNPSEISLKDEKNYALISPNLFRVQKLSHYYYVFRHHLETNVDTNLQLKDITWKRITAVNNLTGAVKVRIDHLGRIVDVGEYK

SEQ ID NO: 628 - protein, 1088 aa, Bacillus smithii
MNYKMGLDIGIASVGWAVINLDLKRIEDLGVRIFDKAEHPQNGESLALPRRIARSARRRLRRRKHRLERIRRLLVSENVLTKEEMNLLFKQKKQIDVWQLRVDALERKLNNDELARVLLHLAKRRGFKSNRKSERNSKESSEFLKNIEENQSILAQYRSVGEMIVKDSKFAYHKRNKLDSYSNMIARDDLEREIKLIFEKQREFNNPVCTERLEEKYLNIWSSQRPFASKEDIEKKVGFCTFEPKEKRAPKATYTFQSFIVWEHINKLRLVSPDETRALTEIERNLLYKQAFSKNKMTYYDIRKLLNLSDDIHFKGLLYDPKSSLKQIENIRFLELDSYHKIRKCIENVYGKDGIRMFNETDIDTFGYALTIFKDDEDIVAYLQNEYITKNGKRVSNLANKVYDKSLIDELLNLSFSKFAHLSMKAIRNILPYMEQGEIYSKACELAGYNFTGPKKKEKALLLPVIPNIANPVVMRALTQSRKVVNAIIKKYGSPVSIHIELARDLSHSFDERKKIQKDQTENRKKNETAIKQLIEYELTKNPTGLDIVKFKLWSEQQGRCMYSLKPIELERLLEPGYVEVDHILPYSRSLDDSYANKVLVLTKENREKGNHTPVEYLGLGSERWKKFEKFVLANKQFSKKKKQNLLRLRYEETEEKEFKERNLNDTRYISKFFANFIKEHLKFADGDGGQKVYTINGKITAHLRSRWDFNKNREESDLHHAVDAVIVACATQGMIKKITEFYKAREQNKESAKKKEPIFPQPWPHFADELKARLSKFPQESIEAFALGNYDRKKLESLRPVFVSRMPKRSVTGAAHQETLRRCVGIDEQSGKIQTAVKTKLSDIKLDKDGHFPMYQKESDPRTYEAIRQRLLEHNNDPKKAFQEPLYKPKKNGEPGPVIRTVKIIDTKNKVVHLDGSKTVAYNSNIVRTDVFEKDGKYYCVPVYTMDIMKGTLPNKAIEANKPYSEWKEMTEEYTFQFSLFPNDLVRIVLPREKTIKTSTNEEIIIKDIFAYYKTIDSATGGLELISHDRNFSLRGVGSKTLKRFEKYQVDVLGNIHKVKGEKRVGLAAPTNQKKGKTVDSLQSVSD

SEQ ID NO: 629 - protein, 1099 aa, Corynebacterium accolens
MSLLYRVGIDVGTYSLGCTAIEVDDNDQPVSILSSVSLIHDSGLDPDQQKRAVTRLASSGVARRTRRLYRRRRRRMVKLENFLTAQGWETLPFERYSDPYLPWHARVALVNGYISDDTQRGQYLSIAFRHIANHRGWRNPYWKVSSLYSPDKPSDAFEQIRKELEASTGRQIPETATVGQLISFAQFGKDRLRGGGKQKDKKKPQEQVNQAVISARLHQIDHAREINEICRVQKIDDTLRKQILDLVFAAESPKGAQKGRVGKDPLQPKLFRALKASDAFQQYRIAALTGNLRIYRNGVTVPLDRDEKLIVFNYLVNLPKKEEPSWLKIAEILNIDRGQLRGTATMTDDGERAGATPPVHDTNRTILDSKVKPLAHWWENASDDERAAMLKSLSNSEVEDFDSPAGAQVQAFFADLDETEQEKLDSLHLPMGRAAYSEDTLMRLTNRMLDENLDLYEARLAEFGIPKDWAPPAPRIGEPVGNPAVDRVLKGVARWLEAAADEWGAPKSVVIEHVRDGFVSKSKAIEIDRANNNRHKRNRELFQKMQENLGIEGKVRSSDLWRYQSVQRQNCQCAYCGSPITYTTCEMDHIVPRAGEGSTNTRDNLVATCHRCNLAKKNIPFAVWAEKSTIPGVSVKEALDRTRHWSEDSGMSKKDFQKFRKNVCERLNRTVVDEPLDARSMESVAWMANELRGRVAQRFQEENTTVNVYRGALTAEARRAAGITDKLRFIDGTGKSRLDRRHHAVDAAVVAFIHNYVAETLAIRSNKKREAQLLQGTSQWKEFTGSDDKHRAVWNAWIPKMQKLAVLLQIALDEDRIVVTSNLRLRLGNGRAHEDTISELKTIRVGDAISVTDIDRASSEALWCALTREPDFDEKDGLPENPNRRIRVHGTWYDAEDEIEVFPVGAGAIKVRGGYAKLSRFHHARVYKIPGKKAPIYCMLRVYNTDLVQHRHEDLFSVELKPQTMSVRQAEPKLRKALAENTAEYLGWLVTDDELIIDTSTFRTGLIEEMQSEFGLVRRWRLDGFDSPSLLTLRPLHMSAEGLPDDCALGSRKIIDTKGWRVSINKVFNAGNTTVVRRDALGRARLTSNAHLPISWKEE

SEQ ID NO: 630 - protein, 1392 aa, Streptococcus mitis
MNNNNYSIGLDIGTNSVGWAVITDDYKVPSKKMKVLGNTDKHFIKKNLIGALLFDEGTTAEDRRLKRTARRRYTRRKNRLRYLQEIFSPEISKVDSSFFHRLDDSFLVPEDKRGSKYPIFATLAEEKEYHKNFPTIYHLRKQLADSKEKADLRLIYLALAHMIKYRGHFLYEESFDIKNNDIQKIFNEFISIYDNTFEGSSLSGQNAQVEAIFTDKISKSAKRERVLKLFPDEKSTGLFSEFLKLIVGNQAEFKKHFDLEEKAPLQFSKDTYDDDLENLLGQIGDGFAELFVAAKKLYDAILLSGILTVTDPSTKAPLSASMIERYENHQKDLAALKQFIQNNLQEKYDEVFSDQSKDGYAGYINGKTTQEAFYKYIKNLLSKFEGSDYFLDKIEREDFLKKQRTFDNGSIPHQIHLQEMNAIIRRQGEHYPFLQENKEKIKKILTFRIPYYVGPLARGNGDFAWLTRNSDQAIRPWNFEEIVDQASSAEDFINKMTNYDLYLPEEKVLPKHSLLYETFAVYNELTKVKFIAEGLRDYQFLDSGQKKQIVNQLFKEKRKVTEKDITQYLHNVDGYDGIELKGIEKQFNASLSTYHDLLKIIKDKAFMDDAENEATLENIIHTLTIFEDREMIKQRLAQYDSLFDEKVIKALIRRHYTGWGKLSAKLINGICDKKTGKTILDYLIDDGYSNRNFMQLINDDGLSFKDIIQKAQVVGRTNDVKQIVHELPGSPAIKKGILQSIKIVDELVKIMGHTPESIVIEMARENQTTARGKKNSQQRYKRIEDALKNLAPGLDSNILKEYPTDNIQLQNDRLFLYYLQNGKDMYTGEPLDINQLSSYDIDHIVPQAFIKDDSLDNRVLTSSKDNRGKSDNVPSLEVVQKRKAFWQQLLDSKLISERKFNNLTKAERGGLDERDKVGFIRRQLVETRQITKHVAQILDARFNTEVTEKDKKNRNVKIITLKSNLVSNFRKEFKLYKVREINDYHHAHDAYLNAVVAKAILKKYPKLEPEFVYGDYQKYDLKRYISRSKDPKDVEKATEKYFFYSNLLNFFKEEVHYADGTIVKRENIEYSKDTGEIAWNKEKDFATIKKVLSLPQVNIVKKTEIQTHGLDRGKPRGLFNSNPSPKPSEDSKENLVPIKQGLDPRKYGGYAGISNSYAVLVKAIIEKGAKKQQKTVLEFQGISILDKINFEKNKENYLLEKGYIKILSTITLPKYSLFEFPDGTRRRLASILSTNNKRGEIHKGNELVISEKYTTLLYHAKNINKTLEPEHLEYVEKHRNDFAKLLESVLDFNDKYVGALKNGERIRQAFIDWETVDIEKLCFSFIGPRNSKNAGLFELTSQGSASDFEFLGVKIPRYRDYTPSSLLNATLIHQSITGLYETRIDLSKLGED

SEQ ID NO: 631 - protein, 1036 aa, Helicobacter typhlonius
MRIFGFDIGITSIGWAYVESNELKDCGVRIFTKAENPKNGKSLALPRREARGARRRLARRKARLNAIKRLLCKEFGLNVSDYFANDGELPKAYETTKDTKSPYELRSLALEQKLEPKELARVILHIAKHRGYGNKHAKTGSDKDSGKVLSAIKVNETAMKDKYQSVGEYLYKEFYQKLRLESEKKGNNITKEFKNVRNKGENYEHCVAQEQVRAELELIFAKQKDFGATFSENFESQIIETAFYQRDLKSFEDKVGKCVFYENENRAPKDSLSAMEFVALTRIINTLKNLEEKSKNLGIGEVYGKDKIQEILKIVLDKGEMSYKKLREILHLDEHILFAKDSKLDYTQGVQEAEKAKFIELKNLKAFKKAMGGDFSNFAREELDKIATDITLVKSKENLAKKLQNYSALSKEQVEALSNLSFAKHIDLSLKALEQILPFMRGDKTGKCLRYDEAVKKAELQEHRKHKQKGEFLIPLKDYEPYLANPVVARALSEYRKVLNALLRKYGKVHKIHLEFTREAKLSAKERQKYEKEQKEHFEANQRAIQQCEILGLPINGTNILKMKLWLEQGECCAYSGEKITREHLLDSNALQVDHIYPYSRSFDDSYMNKVLVFAKENQDKGNKTPFEAFGGDKEKWDRILSLSAKLPKQKQRRISNTNFKDKEGGFLARNLNDTGYIAKLASQWTKDCLEFEDLRENEVTIAGEKGSSVHIEVVSGQLTSMLRHYWGLGNKDRNNHLHHAVDAVILAYTNNAMIKAFANFRKNQEENKKKFYAKQIAESEYKAKKAFFEPCKNFRQRVEEKIKEIFVSKPPRKRVRGALHQETFYPFEKLCNDKEYSEKLKMDYGGEKGMQKAIALGKIRQIGTKIVSNGAMVRVDIFKDKKGKFYAVPIYTMDFALGILPNKAVAIGKDKDGVIKDWIEMDSNYDFCFSLFKDDLILVQKKEMERAELCYFVSFGSTNAQINVEKHNNKFEGLSENEKILYSNATQKEVAGKSIGIQNLKTFEKYQVSPLGEVQKAEFEPHQEIKLKSSPKRKD

SEQ ID NO: 632 - protein, 1123 aa, Mobiluncus curtisii
MFVYLNSPRGFGPATFLTDLPHFCIIFGNNDFMDNRKYHVGIDVGTNSVGFAAVEVGDSGSPIRFLNTMVVIHDSGVDPEQKKYAITRLASAGTARRTRRLYRTRRQRLRELDDFISNELGYPLVNLENFADPYEPWKVRADLATIKLPADELPEAMSIALRHMARHRGWRSPYQRVEALHLHAEISEEFSALKKRVMEKTGDVFSDDATPAEVLVDLMGRQKIRGADGMLSGKLRQSDNANELRKIASVQGIDDETLNRIIDRVFFSRSPKGKASERVGMDALPGQGSKPRALKAMPSFQKFRIVSVICNLRIKDSGDDNRPLSMEEKEQLIGYLMSSTTDDHVTWTDVAELLHVKRSNLQGTAKEGPDGERPYTRPPVNSAWSKIKDSKIKSLVALWKTGDVDVQSAIVEALSNASVLEDARPGADIVVAYLESLDDKELESLDKVGLPAGRASYSEDSLERLTERMLQDDCDLFEARKREFGVSDDWKPPADPIYAPVGNPGVDRVLKIVNRLLMAAEREWGAPTQINIEHVRSGFSSELMQREFERENERRRAQNEEAVKAILTEKGGNSHVSKYDIIRYYAVKRQNCQCLYCGTPITFSDCELDHIVPRKGVGSTNSRVNLAAACRSCNRDKSNLPFAVWAGKTSNFDVSIDGAVSRVKQWQRSQNEGAREFRAFQNEVISRLLKTTEDPEIDSRSLESVAWMARELHHRVEYYFQSKGAQTQVSVYRGAVTAQARKSSGLEDKVKMIGGGGKTRLDRRHHAMDAATIALMTPGISTTLSEKNNLRDAQKFTGQSETWKDYCGRTETAREHFAVWKSNMERLTDLFNDKLENDAIPVVQPLRLRLSDSKAHDDGIGKLDSKKLGSVWSLADIDRAATPQIWTALTRCDDFDPTKGLPENANRVIRAQGVKYESEDNIPVFPSNVAAIAVRDGYAEIGSTIHHARIYRIDDGKKIFYSMIRVFAVDLLKHQAEDLFTVKLPPSAISIRTCEDSLRRALSNGTAEYLGWLVPGDEIIVDTSDKAFHTGQIGDLLRNFPVNSFRLTGFPSNSRLRLKPVLLAGEGLRDDAEDSIKKILSGQGWRPAINVLFSKGKPRIVRRNSLGIERPSSNNGLPFSWEA

SEQ ID NO: 633 - protein, 1126 aa, unidentified
  source 1..1126: note = Streptococcus
MNGLVLGLDIGIASVGVGILNKETGEIIHANSRIFPAATADSNVERRGFRQGRRLGRRKKHRSVRLNDLFEEFGFVTDFSDVPLNLNPYILRVKGLSEELTIEELFIALKNIIKRRGISYLDDASEDGETASSEYGKAVEENRKLLTDKTPGQIQLERFEKYGRVRGDFTVVENDENHRLINVFSTSSYKKEAERILKKQQEYNQDISDEFIQDYLTILTGKRKYYHGPGNEKSRTDYGRFRKDGTTLENIFGILIGKCTFYPDEYRAAKASYTAQEFNLLNDLNNLTVPTETKKLRPEQKRQIVEYARTAKTLGTPTLLKYIAKLVDGSIDDIKGYRIDKSDKPEMHTFDAYRKMRTLELVDVDILSRETLDDLAHILTLNTESEGILEALNSKMPGTFTKEQIDELIQFRKKNSAVFGKGWHNFSLKLMNELIPELYETSEEQMTILTRLGKQRSREISKRTKYIDEKELTDEIYNPVVAKSVRQAIKIINLATKKYGIFDNIVIEMARESNEDDEKKAIQNAQKANEDEKKAAMEKAANLYNGKKELPDSIFHGHKELATKIRLWHQQGERCLYTGKNISIHDLIHNPHHYEIDHILPLSLSFDDGLANKVLVLATANQEKGQRTPFQALDSMDDAWSYREFKQYVRNSKSLSNKKKDYLLTEEDISKIEVKQKFIERNLVDTRYSSRVVLNTLQEFYKTNDFDTKISVVRGQFTSQLRRKWKIEKSRDTYHHHAVDALIIAASSQLRLWKKQNNPLISYKEGQLVDPEMGEILSLTDDEYKELVFRPPYDYFVDTLKSKSFEDSILFSYQVDSKYNRKISDATIYGTRKAQLGKDKQEETYVLGKIKDIYSQKGYEDFIKRYKKDKTQFLMYHKDPQTFEKVIEEILKTYPDKELNEKGKEIPCNPFEKYRQENGPIRKYSKKGNGPEIKSLKYYDNKLGNHIDITPVNSQNQVVLQSLKPWRTDVYFNPQTSKYELMGLKYSDLRFEKGSGNYGISPEKYNKVKAKEGVDEDSEFKFTLYKNDLILIKDTETGEQQLFRYLSRNDGGSNKAQIKPYKKAEFEPKEKLMSILGNVPNSTSQCVKALNKTNISIYKVKTDVLGNKYFIKKEGDQPQLNFKKKI

SEQ ID NO: 634 - protein, 1233 aa, Mycoplasma canis
MEKKRKVTLGFDLGIASVGWAIVDSETNQVYKLGSRLFDAPDTNLERRTQRGTRRLLRRRKYRNQKFYNLVKRTEVFGLSSREAIENRFRELSIKYPNIIELKTKALSQEVCPDEIAWILHDYLKNRGYFYDEKETKEDFDQQTVESMPSYKLNEFYKKYGYFKGALSQPTESEMKDNKDLKEAFFFDFSNKEWLKEINYFFNVQKNILSETFIEEFKKIFSFTRDISKGPGSDNMPSPYGIFGEFGDNGQGGRYEHIWDKNIGKCSIFTNEQRAPKYLPSALIFNFLNELANIRLYSTDKKNIQPLWKLSSVDKLNILLNLFNLPISEKKKKLTSTNINDIVKKESIKSIMISVEDIDMIKDEWAGKEPNVYGVGLSGLNIEESAKENKFKFQDLKILNVLINLLDNVGIKFEFKDRNDIIKNLELLDNLYLFLIYQKESNNKDSSIDLFIAKNESLNIENLKLKLKEFLLGAGNEFENHNSKTHSLSKKAIDEILPKLLDNNEGWNLEAIKNYDEEIKSQIEDNSSLMAKQDKKYLNDNFLKDAILPPNVKVTFQQAILIFNKIIQKFSKDFEIDKVVIELAREMTQDQENDALKGIAKAQKSKKSLVEERLEANNIDKSVFNDKYEKLIYKIFLWISQDFKDPYTGAQISVNEIVNNKVEIDHIIPYSLCFDDSSANKVLVHKQSNQEKSNSLPYEYIKQGHSGWNWDEFTKYVKRVFVNNVDSILSKKERLKKSENLLTASYDGYDKLGFLARNLNDTRYATILFRDQLNNYAEHHLIDNKKMFKVIAMNGAVTSFIRKNMSYDNKLRLKDRSDFSHHAYDAAIIALFSNKTKTLYNLIDPSLNGIISKRSEGYWVIEDRYTGEIKELKKEDWTSIKNNVQARKIAKEIEEYLIDLDDEVFFSRKTKRKTNRQLYNETIYGIATKTDEDGITNYYKKEKFSILDDKDIYLRLLREREKFVINQSNPEVIDQIIEIIESYGKENNIPSRDEAINIKYTKNKINYNLYLKQYMRSLTKSLDQFSEEFINQMIANKTFVLYNPTKNTTRKIKFLRLVNDVKINDIRKNQVINKFNGKNNEPKAFYENINSLGAIVFKNSANNFKTLSINTQIAIFGDKNWDIEDFKTYNMEKIEKYKEIYGIDKTYNFHSFIFPGTILLDKQNKEFYYISSIQTVRDIIEIKFLNKIEFKDENKNQDTSKTPKRLMFGIKSIMNNYEQVDISPFGINKKIFE

SEQ ID NO: 635 - protein, 1102 aa, Azospirillum sp.
MQPYRLSFDLGTNSIGWGLLNLDRQGKPREIRALGSRIFSDGRDPQDKASLAVARRLARQMRRRRDRYLTRRTRLMGALVRFGLMPADPAARKRLEVAVDPYLARERATRERLEPFEIGRALFHLNQRRGYKPVRTATKPDEEAGKVKEAVERLEAAIAAAGAPTLGAWFAWRKTRGETLRARLAGKGKEAAYPFYPARRMLEAEFDTLWAEQARHHPDLLTAEAREILRHRIFHQRPLKPPPVGRCTLYPDDGRAPRALPSAQRLRLFQELASLRVIHLDLSERPLTPAERDRIVAFVQGRPPKAGRKPGKVQKSVPFEKLRGLLELPPGTGFSLESDKRPELLGDETGARIAPAFGPGWTALPLEEQDALVELLLTEAEPERAIAALTARWALDEATAAKLAGATLPDFHGRYGRRAVAELLPVLERETRGDPDGRVRPIRLDEAVKLLRGGKDHSDFSREGALLDALPYYGAVLERHVAFGTGNPADPEEKRVGRVANPTVHIALNQLRHLVNAILARHGRPEEIVIELARDLKRSAEDRRREDKRQADNQKRNEERKRLILSLGERPTPRNLLKLRLWEEQGPVENRRCPYSGETISMRMLLSEQVDIDHILPFSVSLDDSAANKVVCLREANRIKRNRSPWEAFGHDSERWAGILARAEALPKNKRWRFAPDALEKLEGEGGLRARHLNDTRHLSRLAVEYLRCVCPKVRVSPGRLTALLRRRWGIDAILAEADGPPPEVPAETLDPSPAEKNRADHRHHALDAVVIGCIDRSMVQRVQLAAASAEREAAAREDNIRRVLEGFKEEPWDGFRAELERRARTIVVSHRPEHGIGGALHKETAYGPVDPPEEGFNLVVRKPIDGLSKDEINSVRDPRLRRALIDRLAIRRRDANDPATALAKAAEDLAAQPASRGIRRVRVLKKESNPIRVEHGGNPSGPRSGGPFHKLLLAGEVHHVDVALRADGRRWVGHWVTLFEAHGGRGADGAAAPPRLGDGERFLMRLHKGDCLKLEHKGRVRVMQVVKLEPSSNSVVVVEPHQVKTDRSKHVKISCDQLRARGARRVTVDPLGRVRVHAPGARVGIGGDAGRTAMEPAEDIS

SEQ ID NO: 636 - protein, 1116 aa, unidentified
  source 1..1116: note = [Clostridium] spiroforme
MVEFLLKEMKIMGRLVLGLDIGITSVGYGVIDIDKNEFVDYGVRLFKEGTAINNEERRSKRGARRLKRRKTNRIADMKKLLERNGLIDEQYTALNNPYEIRKKGLKNKLSNYELATAILHITKNRGTCLESNADETQDEESTKNILSKNALELKDKYICEIQLARLEESGKIRGINNNFKTEDYLKELSKILENQDLEKETIDKIKEIVARRRRYDQGPGSEKSPTPYGSYRMENGELVHVNLIDMMRGKCSVFPDQLRAPQQSYSAELFNLLNDLNNLKINGEKLSSTEKQKIIDFVNEKGGITVKQLLKLIDVGITEISGFRIDKNEKPLITEFKGYKKVLKVFKNYNQESLLNDKSIVDTIMDINTKIKSIDERSDQLKQVLPSLDTSIINDLASIKGVSGYHSLSLKALNLINNEMLKTEMNQMQVLHQLDIFDKNRVSLKGQRQIYADDNAILSPVAKRAHRETFKVINKLRSIYGEFDSIVIETTRDKNTQDQKKRIKNNQKNYEERNTEVNNFLKEAGYNPENINAKTKMKIRLYIEQDAKSAYTLQDINLKELIEDEKAYEIDHIIPISISLDDSFNNKVLTTHDENQEKGNLTPISAFLKGKFHNGNLNTYKVFIQNNKNLNRKKKEYLLCEDDITRYEVVQNFINRNLVDTSYACRTVMNTLVHYFKDNEINTKVHTIKGQATSTFRKRIGLIKDREEDYFHHAIDALIVASLKKMNLINSYLMKVDFNEMYDEETGEIFNVLPDNSYLDEKYISFVSNLKNIYEESNKYIRGVMIKEKMTYPLIKVSHKIDTKPNRKISDDTIYSTRNVDNQDMLVERIKNIYDPKENAANTLINDIINDNTDKYIMYHKDPQTFDKIKAIVLNHFNEFKTDKNCYIVTKEGLYKLKGTSPLALYYEEFGPITKYAKKNNGPTIHSMKFYSEKLGNHLSITHKYSTVNKKVITKQISPYRTDFYQSPEGKYKFVTVRYKDVAYNAKKDKYIIDHSWYREQKKLKKIADEWIFVCSVHRDELIGIMKADGQKRIFDSSTESDGETLYHDAKTYEILKFTATNNDITGRFEVKPIYCYCKKQLMVSIGTCRKIQKFATDVLGNLYIVKDNVLKLEFK

SEQ ID NO: 637 - protein, 1398 aa, Veillonella atypica
METQTSNQLITSHLKDYPKQDYFVGLDIGTNSVGWAVTNTSYELLKFHSHKMWGSRLFEEGESAVTRRGFRSMRRRLERRKLRLKLLEELFADAMAQVDSTFFIRLHESKYHYEDKTTGHSSKHILFIDEDYTDQDYFTEYPTIYHLRKDLMENGTDDIRKLFLAVHHILKYRGNFLYEGATFNSNAFTFEDVLKQALVNITFNCFDTNSAISSISNILMESGKTKSDKAKAIERLVDTYTVFDEVNTPDKPQKEQVKEDKKTLKAFANLVLGLSANLIDLFGSVEDIDDDLKKLQIVGDTYDEKRDELAKVWGDEIHIIDDCKSVYDAIILMSIKEPGLTISQSKVKAFDKHKEDLVILKSLLKLDRNVYNEMFKSDKKGLHNYVHYIKQGRTEETSCSREDFYKYTKKIVEGLADSKDKEYILNEIELQTLLPLQRIKDNGVIPYQLHLEELKVILDKCGPKFPFLHTVSDGFSVTEKLIKMLEFRIPYYVGPLNTHHNIDNGGFSWAVRKQAGRVTPWNFEEKIDREKSAAAFIKNLTNKCTYLFGEDVLPKSSLLYSEFMLLNELNNVRIDGKALAQGVKQHLIDSIFKQDHKKMTKNRIELFLKDNNYITKKHKPEITGLDGEIKNDLTSYRDMVRILGNNFDVSMAEDIITDITIFGESKKMLRQTLRNKFGSQLNDETIKKLSKLRYRDWGRLSKKLLKGIDGCDKAGNGAPKTIIELMRNDSYNLMEILGDKFSFMECIEEENAKLAQGQVVNPHDIIDELALSPAVKRAVWQALRIVDEVAHIKKALPSRIFVEVARTNKSEKKKKDSRQKRLSDLYSAIKKDDVLQSGLQDKEFGALKSGLANYDDAALRSKKLYLYYTQMGRCAYTGNIIDLNQLNTDNYDIDHIYPRSLTKDDSFDNLVLCERTANAKKSDIYPIDNRIQTKQKPFWAFLKHQGLISERKYERLTRIAPLTADDLSGFIARQLVETNQSVKATTTLLRRLYPDIDVVFVKAENVSDFRHNNNFIKVRSLNHHHHAKDAYLNIVVGNVYHEKFTRNFRLFFKKNGANRTYNLAKMFNYDVICTNAQDGKAWDVKTSMNTVKKMMASNDVRVTRRLLEQSGALADATIYKASVAAKAKDGAYIGMKTKYSVFADVTKYGGMTKIKNAYSIIVQYTGKKGEEIKEIVPLPIYLINRNATDIELIDYVKSVIPKAKDISIKYRKLCINQLVKVNGFYYYLGGKTNDKIYIDNAIELVVPHDIATYIKLLDKYDLLRKENKTLKASSITTSIYNINTSTVVSLSNKVGIDVFDYFMSKLRTPLYMKMKGNKVDELSSTGRSKFIKMTLEEQSIYLLEVLNLLTNSKTTFDVKPLGITGSRSTIGVKIHNLDEFKIINESITGLYSNEVTIV

SEQ ID NO: 638 - protein, 1440 aa, Tamlana sedimentorum
MAKLGLDLGSSSLGWAIRDGDEISKKGVITFPSGMVKGQGGGYSSPTRDRREARSKRNLIRARKYRKWKLLEILCKNSEYVPLNILQLESWSKYKKGQARMFPENEKFLRWLSCDFSYQGGEMYKNPYELRVKALDQPLTKHEFGRVLYHLVQRRGYKDIGESDKETESQIKRRGESGFQKALDNNRTIAEALKNEFLDKGIRARNEYPYREEYQNELELICKAQGYNVSRDGKYDYQDQFVLSLWKSIVWQRPLRSQKGAIGKCTLEPSKLRCPVSHPIFEISRAWQFINTIKYYDKDDEKQNLPEDLKELLFNDVFIKKDNFKFEDIRRYLDKKFKQKTKYNYPLSKKTGKYETSVSGMPFCNGIIKILGDVAYDSLMNIEKYNIGNAPKIINGYSILDVWHAVFDFDEEYLEAFTNEKLKVENTTVKRNKKEVSLSPLVILKNKLTVGYGDLSVKALKKIIPFLKQGYLYNDAVMLAKLPKLMGNEWESQKEDILKLAKSSQETYNWCRIIVGITNNLIDAYKGEVEDWRETGKSVKAWKDFGYLLTEDDKREVINACIGYFGETSWDKRKDKETIISEVGKEYQEFFFDSKRVYREMPTLTSLFFETLSVNGIKLSGELYHHSTRKNIYGTKVTDKNTGKDILPIPLIDSIKNPMFNKSMSILRRLVNELILKGEIDKDTEVVVEVARELNDNNKRVAIERYQNERRKKREKIRAFLEEFKTKENKSFNVEERIRDFELWCEQSFEETFDKSGKKIVNKKNSEILSEKKAIRRYELWMEQKGQCMYTGKMIPIAQLFSNDIDVEHTIPRSLLPDNTMANLTVCYAKYNRENKGKLMPFFCENYEEDLAGIGTAIKPRLREWEKTMDNYKSLFESRLKSTGNEDEAKKNKRIQEKHYFRMHYEYWKDKVERFTTDEVKDSWARRQLVDTQMVSKYAREFLKTYFKKVAVQKGEVTAQFRKIYGFQETDKIKSRNKHTHHAIDAAVLTLIPVNSSRRDALLDKMYKMEEREGKQFSTKPFDLFNSQELINVIESQTLIVNYEKDKILQQTVKNVRKRGKLQYVKDKYGNFVTDEKGEKIIKKSQGDTVRSTLYKQTFIGKIRDVGRYPDGQPIRENGEWKYKTGEDEFLFTERKPLKDVLSKVDDIIDPVIREIIRTQKSQATDPQGNKIRHVRVKSKAGQVVKQRVNYRSKHEYKNYYYSAAGSIPYAVMLQKNINDKIERKIIPVASFEVSKVFMEHKKFSLELYLEMFHPNLSGYQDTKLLKVGQKVLMLNDDSEFEQRKDMEFQKNRLYRITQFANDGKRIMLKYHLEAQAITDVRKNVNEQKHKILTSEEVKMGISEILENTSITNLADRKKDFEKRKYNFNDRLNKIESVSNKLKKTQVKKMINNYQTEYSSFPENIIPSFLKISNNNWNFLYENYDFKVSILGKLIWLKND

SEQ ID NO: 639 - protein, 1360 aa, Lactobacillus casei
MTKLNQPYGIGLDIGSSSIGFAVVDANSHLLRLKGETAIGARLFREGESAAGRRASRTTRRRLSHNRWRLRFLQDFFDPHISSIDPDFFLRQKYSEISPKDKERFKYEKRLFNDRTDAQFYKQYPTMYHLRLHLMNDASKADPREIFFAIHHILKSRGHFLTPGDAKNFNTDDVDLKHIFPALTEAYAQAYPDLTLSFEPSKAEKFKSILLDEDATSNDTQKALVKLLLSDDGDKEVLKQQKKVLTEFAKAVAGLKVKFNVALGIEVTDADVEKWHFGMAQLEDKWSDIEPSLTDQGMEIFEQIQDLYRARLLNGIVPAGKTLSQAKVDDYDQHCKDLKLFKEYLKQLNDHDLAKRIRLLYDRYIDGDDAKPFLRDDFVKALKKEVTAHPTELAESLLERMEQDNFMLKQRTKANGSIPVQMQQRELDKIIANQAEYYSWLAAENPVKEHRDSKPYQLDELLNFRIPYYVGPMITKKQQEKSGQNVFAWMVRKDPSGNITPYNFDEKVDREASANAFIQRMKTTDTYLIGEDVLPKQSLLYQKYEVLNELNNVRVNGESLSTDQKKRLIRELFERHSSVTLKQFVENLVAHGDVAKRPDVRGLADEKRFLSSLSTYHQLRGILHDAIDDRGKQSDIENIITWSTVFEDASIFKSKLGEISWLDSKTRTTLSNIRYRGWGQFSRKLLDGLKLGNGHTIIQELMLSSRNLMQILTDETLKKEMATLNQERLKPDSINEAIDAAYTSPSNKKAIRQVLKVVDDIKHAANDQAPSWLYIETADGGGHPGKRTLSRQKQIQAIYENTAKELIDSAVRGELKDKIADKTNFSDRLVLYFMQGGHDIYTGTALNIDQLSSYDIDHILPQSLIKDDSLDNRVLVHAKINREKNAEFASTLFAAKMASTWHRWRDAGLISGRKLKNLLMRPDEVDKYAKGFVARQLVETRQIIKLTEQIVAAQYPDTKIIAVKAGLSHQLRQELDFPKNRDVNHYHHAFDAFLAARIGTYLLKRYPNLAPFFTYGEFTKTNLKKLQSFNFIGALTHTDGKITSKDTGEVLWDNQRDIEELDQIYNFKRMLITHEVYFETAGLFKQTVYAAKDSKERGGSRQLIPKKKGYSTGIYGGYTQETGSYNALVRLTKAGKVVYRVFKISTQNAAEIAAARSLSAEEGNERLCQILEQSLLKTNKDKKNTVDLFDVVIPRLGKEALFHNSKYGLFLVNSDTYYHNYQELWLSRENQKILKKLFSTKYDQSEMDRDALHLFETIAKQVEQFFKLYDINQFRTKISSAFDAFEKLPVEGEEGKVETLKQLLIGLHANPVRSDLKNLGIKTPFGFLQAGKGIHLDDDTEIIQQSPAGLFKRRVRLADL

SEQ ID NO: 640 - protein, 1369 aa, Lactobacillus iners
MNNNYYLGLDLGTNSVGWAVTDDHYNIIKFHGKHMWGMRLFEEAETAKDRRLHRQARRRRQRLVERINLLEELFDKEISKVDQGFFARKKESDLHFEDKTTKSEYALFNDKSYTDRDYYKQYPTIFHLIMDLIENDKKRDIRLVYLACHYLIKHRGHFIFDGKNFTVDNSFENLLDKLITYLKDNDDITLSFPKDQLINIFKNSNLNSTEKSDQLKPFFGRTNLEKGIIKLLSGGKQDLSNMFRDETLKNSNYKNLKFSDNRFDDERDGYAADLGDRIDLLILLKQIYDASILESMMSQARVSIDGHKYISSAKVCAYEKHKSDLKRLKSLIKKYLPSEYNNIFRKITEKDNYVAYSKSNITNNKREKALKYVKYVDFTKYLTKKLKTIKTQDAEDDQEIFEIKGELEKQSFLPKQRTLDNSIIPYQLHLMELKKILDNQSKYYDFLLAKDDQEGITVKDKIISLLTFRLPYYIGPVNPAVHGKFAWVKRLANGKVTPWNYKEKIDIDASHEEFIKTKLSKCSFLIGCDVLPKNSLLYQKYMVLSELNTIKFNGVNISEKLKDDIYQNLFKNIQKVTKKRLQNYIKEHENIIGDVIVTGIDNAFKQGLVSYLKFKKIIGDKVDDDRYQKVLEKIIRDITLYDECAGKKIKKEYKDSDLFTEDELNKIVKLTFNDWGRLSAELLDQLEGEDTVSGETGKIIEFMQKHNYNLMQLMSKKFTFKSKIDEINKSYYQHDKFNYKSMIDSLYVSPATKRILWQSLKVVHEISKIMKHDPEKIFIEMARSKEDHPKRKLSRKADLKQVYKDSKKQIISIIGKDKYQDLSNELDNKDDRDLRWDNLYLYYTQLGRSMYSLKPIDISELMNKNLYDQDHIFPKSKKYDDSIENRVLVEKELNVKKSDIYPISDANIIPQKIKGQVESFWKMLYDHKLIGDKKYARLIRSKAFTDDELAGFIARQLVETRQATKETADLLKRLCPKSRIVYAKAQNASIFRQKFDIPKSRTINDLHHAQDAYLNIVVGNIFDTKFTQDPRNFIKNTKDSRNYNLEKIYDYNVERNNYVAWIAPDGETNGTIANVKCNLSTKDFRVTRPSFYKKGALFNQNLSRKGSNLAPIKEHSPKSNPLKYGGYSGKNNSFFVVVAGKDNKGKDIVKLIPVNTLIYNKMLHCDYKAKQELLTSYVANNFAINNFRIVKDDIKMYSLVKIDGAYYYLVGGTDERIEVKNAMQLLLSKDSIKAVKILEKESKDQFANIKNYKDIDIKLGRTFNEVVSKYTNSVFGKSMLISDKYRKDIFKSVEKSILEFNHLDTIGKADNLLKFVTLMRPSGSAHSLKMVGLIERIRKSNVISNFNEFKLINQSVTGLFENEEDLLKL

SEQ ID NO: 641 - protein, 1021 aa, Gamma proteobacterium
MPQLMRYRLALDIGSTSIGWAMIRLSMQNEPIAIIRMGVRIFSDGRNPKDGSSLAVTRRVARQMRRRRDRLLKRKTRLLNALVQKKFFPEDADARKALVVLNPYELRKEGLYRQLSGPEFGRALFHISQRRGFLSNRKTDKKDNDSSVLKKAIVDLRQQLEVENCQTIGEWLFKQQQSGKSVRARLRGKTQKDKAYDFYIDRAMIAHEFDTLWVSQAKYDPLLFNEDARAILRDILLYQRPLKPVKPGRCTLIPDESRAPLALPLTQQARIYQELNHLRITTPALGAQALTVAQRNTIAALLEKSDVTFVKIAKALGLTSTTEFNLQDIKRDRLKGNATAIILARNQYFGRRWHDFNADLQNLIVDKLVNEGSETALIEWLKANTDVDESAAERVSGVTLPEGYGSLSVAALRRLLPALKEDVVVYSEAVKRAGFDSHSALSLIEQTGELYQELPYYGEVLQRHVGFGSGDPNDSPERRFGKIANPTVHIGLNELRKIINALIKRYGNPAEVVVELARDLKLSREKRKEIQEEQKQRQDRNEKRIKDACEILGIDPLVIDRGKRREISQKMQLWDELNPKDAANRRCPYTGDQISIEKLLSAEVEIEHILPFSKTLDDSLNNKTVAMRRANRDKGNRTPYEAFGESLNPDYDYDAILQRASLMPREKRKRFASDGYQQWLRDDKDFLSRALNDTAYLSRIAKEYLTLICPPNSVRAIPGRMTAQLRAMFGLNRLLSEGGIKNREDHRHHAIDAAVIGVTDQGLLQKFSRASARTRELQLSRLVDDMPLPWDTYREHVTRALEHLVVSHKPDHGYQGKMHEDTAWGLRDNGQVTRRVRSEDGGPRQRLLENKNVVKINSTRDFSRHGIDEQGQVNAYKGYVGGSNYCIEIWIDEKGKWNSDVVSTFQAYQIVRELGEKAAWQKLRNPLLSLSAKPLVMRLIIDDVVKMQIAGQNKIMRVVKIAQNGQIFFAEHNEANVDARDKDKNNPFKYISKTAGSLQKAGGIHMAISPIGDARPVRYGR

SEQ ID NO: 642 - protein, 1142 aa, Actinomyces sp.
MIDSSENVPGIRYRVGIDVGLKSIGFCAVEVDRNDQPVRMLNSMVFIHDAGVDPNENKAAKSRKLTAGVARRTRRLYRTRHQRLVNLDRVLSKEFGWPLPDLTSFKDPREPWHVRAGLLEGYIADDEKRKEALSIALRHIARHRGWRNPYAKVETLLQPSEPSDFLKGLNDRISEELGRAFPADATPGQLVDTYLAHPDYVGRAGTPKLRGPQGILAGKLHQSDNAQEIRGICDVQRIEPAERDRLIRVVFEAKSPKGSAKERGLVGYDELPGQGRHVRAEKAHPAFQLFRMVSVLANLRIREGREERPLTPDELEDLVDFINQVSLKQEVTWQDLADKLRIERADLRGTAKASFDGSPVLRNPPTDVTTEKIMACKVKWLKEWWKEADDEQRGYMVDAFSNSGGSEDGTDVNDEVAELLEQATEDDQLEFEKISLPQGRAAYSLDSLRRLTDRMLRDGVDLHTARRLEFNVGDDWKPAVEPIGAPTGNPAVDRVLKQVSRWLHAATERWGEPTVINIEHARDGLGSERVARELMRENEKRRKANASAVAEMAAKLKLSGKVHRSDQIRYFALQRQNCQCLYCGAPITYTTAEMDHIVPRADGSSTNDRSNLAAVCRTCNHMKGKIPFAVWASSDKANQGVSLTGALERVNMWQRDSGMSPRQLKQLQREVCARLKSKKPDQEFDGRSMESVAWMAVELRTRIEGFYRSRDEESVPSVGVYRGQLTAEARRASGFESRVNLIGGRGKTRFDRRHHAMDALVIALMNPSVSRTLALRLNMRDAQRLTGVEETWKHFYGKPGEASKRFESWRESMLRGVELFNIALSDNAIPFVENIRLRVGSSVIHDATVHSFCPPKTPDGKQIITKGYGEQHSLGSAMPVELIDRAETPALWTALTRCPDFDPKKGLPENPQRTISVNGTRVGPTELVNFFEFSKSGPKACLKVRGGYVDLSGAIHHARIYRIAGKKTAYAMIRVFQVDLLRLKDHDVFTTPLKPSTISMRTAEPKIREALANGTATQIGWLVEGDELVIDTSKYSGGFIGEVLARYPEATSWRVAGFMTPAKLRIKPILLSKEGFVDETQAALLGVEVTSEAIQKTVDRPGWLPAVNVLFGAGGVRVIRRNCLGEERYHSSASLPVSMTLE

SEQ ID NO: 643 - protein, 1103 aa, Sphingomonas sanxanigenens
MAWRLGLDLGTNSLGWAALSLDAAGAPDAILAAGSRIFGDGRDPQSGTSLAVDRRAARAARRRRDRFKQRQRALLKHLEADGLFPADPEVQQALAALDPYALRARALDEALSLHEIGRALFHLNQRRGFQSNRKADRGKDEDAGKIAIGVDRLKDAIAAAGARTFGEFLRQRRAGATGENQIPSVRTRLRAETGEGAKGSGYDFYPSRALLKDEFDAIWHAQAEHHPKVLTDEAYHRLHEIVFRQRPLRAPKVGACTLVPGEARLPKAHPLFQRRRLLEELNALMIVRAGAVAERLTPEQRDLLLLKLKDKGKVTFKSLREKVLKLDGDARFNKESEHRTELKGDEVAAEMGGKTRFGSLWPHLSTEQQWTVIERQQALESDADEAAFRTWLVETHKLTAEQARAVAGARLPAGHGRFGLTATAALLAALRDGRTPEGRGPNAPATEAGRVVVYSEAAAIAGYHHSDHRSGEVFTDAKGRPALPYYGVPLDRHIVPGTADPDEPDEAARIGRLTNPTVHIALNQLRRVVNRLIRVYGPPAEVALELARELKLSEDEKKERNRENSRNRLDAEKRSSKLAELGQRDNGGNRALLKLWEELNPENILDRRCIYSGRQISIGMIFSGAAEVDHILPFDATLDDSNANKILCLREANRDKRKRSPFEAWGGTPQWEEIAERASRLPRNKRWRFEPDAMERFAEEGGFLARHLVDTQYLGRIAHDYLRCLYPDKGDGSSHVWVSPGRLTEMVRRKLGLNGLLGDHNLGAEQPKNRKDHRHHAIDAVVTAILDRSMLQRIQRASGEGASDAELLRIIVPEPWTGFRDDLQRAVDRIVVAHRADHGTVAKAATRGRDQTAARLHNDTAYGFTGEADAKGTPIVVHRAPLGALKKPEHIDQVRDPLLRAALHDFTAGLSGKPFEDRIAAFPRLGPLDYRGIRRVRVVEPLQVIPIRDAAGRAYKGYKGDSNYRYDVWELPDGKWEQRVLQMYYAHQSGEPPRPHPAARKVLSLHRDDVLAIERGEGGRELVRVVKFSTNEFTLAPLNEGGALKSRHADKGDPFRYLYPSPSTLKAWRAREVRVDELGRVLDPGFPARKRRRVTRPGRADAD

SEQ ID NO: 644 - protein, 1361 aa, Lactobacillus rhamnosus; identical to SEQ ID NO: 153

SEQ ID NO: 645 - protein, 1263 aa, Mycoplasma dispar
MGKKHITIGFDLGIASVGWAIIESDTSKILNWGSRLFEERKTAQKRRGHRSTRRNIRRKAYRNQKFMNLILKYKELFGLENTSQISRIDKKDVENYKKIEEKFTEIYRNCANKYPNILDLKIKALNSKIEKLELVWILHDYLENRGFFYDIEQNSEEEKKKNKKFASKYKGSEFPSILLDRFFKKNGFFNSYGLVSEYGYNFSNLHWRNEISKLFEIQEIDYEFGKKFLDIFSSVRDYAKGPGSKNSISKYGVFEIDETGKVVEYENIWDKTIGKCSFFVQESRVSSNYPSYEIFNLLNQLINLSSELKLENGKNWQLKTKDRDFLLDKLLEARKNKKNKDASIEDDIIKIILADFGLEKTDITNDDSIQGRDIIKAKPTTKLETTNKLLKIIYSHSSNAKQVKSNNLVEFLPFLDKICAIVDHDKAREKNEVLKKLEEKGIFSKFQIIPEKQEKFLDSLFKEKLNFKKIGNLSLKAIHFFLPKMISQNKNSEFLKWNDLETRQTWEEEKNKIKKVNKKSKYLNPRIFEDEIISPGTKNTFEQAILVLNQIIKKYSKDYQIDAIIIESPRTKNDKKTTYKINKAIKESKEKDKKLFEALNLKEEGYTFEQLKSKSKSLFDKLRLYYQQEKLDLYDLDSSDEGEIKINDLIEKSQNYEIDHIIPYSMSYDNSQANKILTLRAKNGEKRKEIASKYARKKGEEYFKKYLEKVKELFIDSIKSKNNTDYVDLDKDSSKKKYRLLTLEDFDQYHAEFIARNLNDTRYSTKLFYHALRDHFQNNEHFEYLDEKSQIHKVKVATIKGHVTRYFRGKTGYSKDEIFENNAKEDESTHKKVIKKRRENNEHHAVDAAIVAIIGNENRQLANLLTISDNSFENYDEDHKLNVRTGEIVRKPKFEIEKFAKIDELKNKILEQCTIAKNEIPIKFSRKLRTILNCQISNENLCGFKFDENQNKYFKINKINLLNSTNEELEKYFINPFGTEESKYKVLMAESHKVEFERLKEIFFKYKEKGDAFAKYIDDLKKKEPELIDEIDAAKAIGKILYYKLEPLNQQTFYGEPKIVKKYYKNIRIIKYDSIPIQFKMLSKHDGGKSYKDDLRSLYSLVYKVYEKGKETYKSIPVNSALTKFGSNNNDLLDENNYNSQNLLLYKNDFTKPIPTGCKPIIAIKKGVILKKKNYEIQDDFTETEENGRYFFISGISKECGKNIDTRFTLRFIEISKDTVASKRVTDKIFKHYDLIHLDELGNEYPIKIKEHTEEEKKLCTIK

SEQ ID NO: 646 - protein, 1044 aa, Nitrosomonas sp.
MLHKMRYRLALDLGSTSLGWAMVRLNANQQPCAVIKAGVRIFSNGRNPKDGSSLAVTRREARSMRRRRDRLLKRKARMMRTLIEYGFFPANETQRKALENLNPYALRAKGLDEALTPSEFARALFHINQRRGFKSNRKTDKKDSDSGALKTAIKQLHSVLDPQGNDGKPRTVGELLYKRFTDLSKLPKDRTVRARYRQDKIVKDDGKTKIDKYYDLYIDRAMIEQEFDALWKKQSELNPILFTENARADLKDVLLYQRSLKPVKPGRCTFMSEEERAPLALPSTQRFRMYQEVNNLRILREGLKEESLTLQQRDDLINALEKNNRRTFTQIKKLLGVGGSVQFNFEDPKREELKGNTTSAILGKSEHFGEAWFAFNEAKQDAIVLQLIKEENEAKLVRWLQDETGIDEKRAEVIANAGLPEGYGSLCIEALARILPELRRDVVTYDKAVQAAGFEHHSKLNRNEEIPDITFKIESIDRNSGEIKQFHLHKELPYYGEYLQRHVGFGSGKPEDSIEKRYGKIANPTVHIGLNQVRVVVNALIKRYGHPSEIIVEVARDLKQSKDRRDEENKRQAENQKRNERLRKDIADILGISEERVRRDDIEKMILWEELSFDPADRRCPYSGVQVSTVMLLSDEVEVEHILPFSQTLDDSLNNKTVALRQANRIKGNRTPWEAFGTSNISGFDYSGILTRAELMPKAKRYRFAEDGYQRWLKDDAGFLARALNDTRHLSKIAREYMSLICPNTRVIPGQMTAMLRRNFGLNDVLGLNGEKNRNDHRHHAVDACVIAVTDQGLLQRFAAASASARERQLNRLVENMPLPWESYREHVRRAIDGIWVSHRPDHSHEGAMHNDTAYGLRGNGRVSFHKMVEGKREYIEDNLKVIEITDTKAIDRHGLLPTGKPRPYKGYKGDSNYCIEIVRNEKGRWEGEIISTFDAYQLVRKYGIVQLRYPVLSVSGKPLVMRLIRNDFVRLEHEGITRTLRVCKMREDGQVALADVTEANVDARTRTKEICYVFKTGGSLQKAKARRITISPIGELRDPGFKE

SEQ ID NO: 647 - protein, 1346 aa, Pediococcus pentosaceus
MEKVPYNIGLDIGTSSIGFAATDNLNKPIRAKGKTVIGVRLFEEGKTAADRRGFRTTRRRLSRRKWRLRLLDEIFDKEMAKVDNTFFARLKESNLSPKDANKKYLGSLLFPEKKDFKFYEDYPTIYHLRYALMHEKRQFDIREVYLAMHHIIKYRGNFLNSAPMNSFKTQDFDFVAKFEKLNELFESIDAEHETKFDIENISKFRDIMLNQDIRKLDRKKQAAKILILDSTDKTAKKINNKIATAVANSALGYKFALDAILKLDVEESKDWSISLNDEEIDSILDNLTSDLDAERIEIIEILRDLYSHIALNEIVPNGQSLSKSMMDKYDKHHADLDVLKKVISNMDDRKKAKSLKNIYNQYVGKTNDKVLDKDEFYKQIQKNLDESEDAMKIVNEIELDQFMPKQRTSQNGVIPHQLHQKELDEIIENQKQYYPFLAEPNPNEKRKPHAQFKLDELIAFKIPYYVGPLITKEEQQAQSGAKFAWMKRKQDGVITPWNFDEKVDRMASANEFIRRMTTKDTYLLGEDVLPDESLIYQKFKVLNELNNVKVNDKKLTVSDKQDIFNDLFKKQKTVSVSKLQKYFVTEKHYLTEPTIKGLSDTKKFSNSLSTYIDFEKIFGNEILADQNKQNDLEKIIEWSTIFEDRKIFEDKLHEIEWLTEKQIKAVRRYRGWGRLSKKLLVDLRNNEGKSILDELWRTNDNFMQIQAREEFAKSIVEANQKLMNLGGAASVQNTVESTLEDAYTSPQNKKAIRQVIKVVEDIVKAVGYAPEKITIEFTRGADKNPRRTQNRQKQIMEVYKTAAKEIVDATLKGQLENEEKLTDKLYLYFTQLGKDIYSGETINIDQLNNYDIDHILPQAFIKDDSLDNRVLTSRDLNNGKSDSVPVKQFGANMKSFWMRLQAHGLISKRKLNNLMTDPDSIGKYTMQGFVRRQLVETSQVIKLTANILGAIYGENTDIVEIPAKLTHQMREKFNLYKVREVNDYHHAFDAYLTTFVGNYLFKRYPKLRPYFVYGDFKMTDNALKGMRRFNFLHDLKDDEVLVDNETGEVLWEGQKSIEELKKIYGYKFMLTTHEAYTQHGPMFKQTVYSSDTPGKLIKIKNNKPTEIYGGYTSNTDAYMAIVRIKARKGDTYKVVGVPRKEGDALSRIKLLDESKYHENLKNILAINLNKSLNKFDVVLDKVKYRQVIYDGTDHLMLGSSKYKYSTKQLVLSDQSMKILSSTGEFSDEELIKVFDEIMYIVNKNFSLYDTRGFRDKLNNARENFIKLPNKTLFEKGKLKQHSKLEILKQILIGLHANAGRGDLKDIGVNNFGAMVVTAGVTLSPDATIVYQSPTGLFERKVKLSDL

SEQ ID NO: 648 - protein, 1045 aa, Bibersteinia trehalosi
MKPRNLNYILGLDLGIASVGWSVVEIDENEYPIRLIDVGVRTFERAEVPKTGESLALARRLARSTRRLIRRRAFRLLKAKRLLKHHQIVNAEELTQLPNQCWELRVKGLDSLLSNTEWAAVLLHLLKHRGYLSQRKNEAQNADKELGKLREGMDNNSKLLLENNYRTPADIAVKKFAVEEGHMRNQRGAYTHTFNRLDILAEMQLLFKTQRELGSTYANGELEQAFCELLLWQKQALNRSQMLSLVGKCTFEKEEKRAAKASYSAERFVAIQKLQNLRILENGEERGLFDSEFSLLLENAYNLKSGLTYKQVRKILSLSENAIFKGLPYLSDDLEKPEKTQFLAFKFYHQLADILKNNGFSDEWQKLSQEPTLLDKLGTELSLCKEENEFIAQFNGELPEAMLSTLFNHTNFDKFIHISLKALNNILPLMEQGNDYTKAWRKVYPEPTKKDEKTLPPIPADEIRNPVVLRSLSQARKVINAVIRLYGSPARIHIETARELGKSYDDRQKIKKQQDKNSDERDQAVKKFLEECPNFANKVKGKDILKIRLYINQDGKCLYSGKPLDPHRLLEIGYVEIDHALPFSRTWDDSQNNKVLVLANENQNKGNQTPFEWLGKDEHQWALFVARVNGCRFPYAKKQRILTKKLDEQGFLKRNLNDTRYVSAYLMKHIKENLHLVGKGSDKVFASNGQVTNFLRRCWGLEKKREEGDRHHALDAIVVACSTASMRQKITLFKKYQRWNLKTGKHIDQETGEIIPLHFPAPWDFFRQEVMIRIFSEMPQEDLIMQLPDRPQANHEFVQPLFVSRAPSRKMSGQGHEAKLRSARMLEATGKSIKKEFLTDLTIKNLEHMVNKEREPELYQALVEHFKKYGDKPKEKFFKKGGVEVKSIRISKTQNKSVNLGNKTIADNGDIVRTDLFLKNKKYYFVNIYAWQVSKGILPKETTTGNILDNSYEFQFSLFKNDLLEIPHPKNENDSILAYFIRPDDERRWILKFHDNAKIPDIYGKKDETSIRLSIQGQKFIKKYQVDELGKNIRPCRPTKRQGVR

SEQ ID NO: 649 - protein, 1368 aa, Lactobacillus curvatus
MSRPYNIGLDIGTSSIGWSVVDDQSKLVSVRGKYGYGVRLYDEGQTAAERRSFRTTRRRLKRRKWRLGLLREIFEPYITPVDDTFFLRKKQSNLSPKDQRKLYPQTSLFNDRTDRAFYDDYPTIYHLRYKLMTEKRQFDIREIYLAMHHIVKYRGHFLNEAPVSSFKSSEINLVAHFDRLNTIFADLFSESGFQLETDKLAEVKALLLDNHQSASNRQRQALLLIYTPSTNKAVEKQNKAIATELLKAILGLKAKFNVLTGIEAEDVKTWTLTFNAENFDEEMVKLESSLDDNAHQIIESLQELYSGVLLAGIVPENQSLSQAMITKYDDHQKHLKMLKAVREALAPEDRQRLKQAYDQYVDGQENTKAYSKEDFYGDITKALKNNPDHPIVSEIKKLIELDQFMPKQRTKDNGAIPHQLHQQELDRIIENQQQYYPWLAELNPNSKRQTVAKYKLDELVAFRVPYYVGPLITAEQQQQSSDAKFAWMIRKAEGQITPWNFDDKVDRQASANEFIKRMTTTDTYLLAEDVLPKQSLIYQRFEVLNELNGLKIDDQPITTELKQAIFTDLFMQKTSVTVKNIQDYLVSEKRYASRPAITGLSDENKFNSRLSTYHDLKTIVGDAVDDVDKQADLEKCIEWSTIFEDGKIYSAKLNEIDWLTDQQRVQLAAKRYRGWGRLSAKLLTQIVNANGQRIMDLLWDTTDNFMRIVHSEDFDKLITEANQMMLAENDVQDVINDLYTSPQNKKALRQILLVVNDIQKAMKGQAPERILIEFAREDEVNPRLSVQRKRQVEQVYQNISNELLNNTEIRNELKDLSNSALSNTRLFLYFMQGGRDMYTGDSLNIDRLSTYDIDHILPQSFIKDNSLDNRVLVSQRMNRSKADQVPTDFTSVELGQKMQIQWEQMLRAGLITKKKYDNLTLNPDHISKYAMKGFINRQLVETRQVIKLATNLLMEQYGEDNIELITVKSGLTHQMRTEFDFPKNRNLNNHHHAFDAYLTAFVGLYLLKRYPKLKPYFVYGEYQKASQQDKWRNFNFLNGLKKDELVDENTEAVIWNKESGLAYLNKIYQFKKILVTREVHENSGALFNQTLYAAKDDKASGQGGKQLIPAKQDRPTALYGGYSGKTVAYMCIVRIKNKKGDLYKVCGVETSWLAQLKQLTDEDSKKAFLKQKISPQFTKVKKQKGTIVKVVEDFEVIAPHILINQRFFDNGQELTLGSATYKHNEQELILDKTAVKLLNGALPLTQSEELAEQVYDEILDQVMHYFPLYDTNQFRAKLSAGKAAFMKLPWKSQWDGNKMVQVGQQVILDRVLIGLHANAAVSDLGVLKISTPLGKMQQPSGISLSPDTQIIYQSPTGLFERRVALRDL

SEQ ID NO: 650 - protein, 1400 aa, Lactobacillus sp.
MKTITEDYILGLDIGTNSCGWAVMDKKNRLLRLRGKRAIGSHLFEEGHSAADRRSFRTTRRRLKRRKWRLRLLEEIFAEPMAKVDPAFFVRLHQSWVSPLDKDRKKYHAIVFPTAKEDHEFYHDYPTIYHLRDALMREDRQFDLREIFLAIHHIVKYRGNFLQDTPVNSFVASKIDVASFLTNVNQAYADKYGEEQNFIELNENNAAAIEAVIRGKDKDKTTKQLDKAKKITKLLQSSTNKYEKNVTRQIANAIIGYKTQFETILGKDIDKNDKADWEFKLSDGDADDKLENLLPEFDDNDQYIVAEIKKLFGSIALSQIVYENMTLSQSMKCKYKDHGDDYHLLKQYIATLSDHGQVRKLLLAYDLYVNNRHGRLLEAKKEFKQDKALTQDEFYKIVRENLDNSQLAQKILQKIEEEKFMPKQRVNKNGFIPYQLHQIELDQIIANQSKYYPFLAEENPVKEHRKQAPYKLDELVRFRVPYYVGPLISPDDKRKDKQQNKNHEMFKFAWMKRKDNNGAITPWNFAQKVDRETSANRFIKRMTVKDTYLIGEDVLPARSLLYQKFEVLNELNNIRVNGKRLEPKFKQKVFNELFKQKNKVTKKAFKEFILQNTGMKTAEIDGLADPTKFNSSLSSYYHLKSTKVFDKQLDDPEYQADFEKIIEYSSIFEDAEIYQEKLHKEIKWLIPAQFKAIANWRLQGWGRLSRKLLVELKGKGGENIIYQLWTTQKNFMQIVNEPELKKAIVKENHQATEEKGIEKILDDSFTSPANKKAIRQVIKVVDDVVKAAGGKKPAQFAIEFTREPKWNPQLSHIRGTKLLQVYEDTAKKLVDQSLTDSLKENMTNRNLLKDEYFLYFIQCGRDAYTGKKIDIADIHKKYQIDHILPQSFITDDSLDNRVLTEIEINQKKHKKYASHLFATKPAFGLNQSISEMWKTWQKAGLISQRKLNNLLFDPDLVKDKQKKGFINRQLVETSQIIKLVSIILQDKFPDTEIITVKAGYNTALRKELKLYKSREANDYHHAIDAYLTAINDNFLYQVYPNFRPFFVYGQFKKFSQDTDKQKEAIKYYGLKNFLEPLLDDSTGDEVMVNHTKHVVFHKQRDIFNRLIQAYNYKYMLVSRETTTENSNMFNMTIYPRGERDRKKTRKLIPKGKDLDPAIYGGYSGNTDAYMVIVKIEKTKETLYKVVGVPMRALASLKKAQKEGNYDQELNKVLEPLIMFNKNGKSKAGIKGFTVVKDHVHFKQVVIDGDSKFMLYSAQYRANAKQLTLSQETMKVVTDNTDDMDQKNADKDQLLLNAYDEILEKVDQYLPLFDINGFRQGLHDGRAKFAALKTSEKKYTLKNILNGLHDNLVTPNLKNIGIKTPFGLMQSSSGITLSPNAKLVFQSPTGLFEKRVKLTNL

SEQ ID NO: 651 - protein, 1380 aa, Eggerthella sp.; identical to SEQ ID NO: 151

SEQ ID NO: 652 - protein, 1323 aa, Solobacterium moorei
MKNNGNNLQQGNYYLGLDVGTSSVGWAVTDTDYNVLKFRGKSMWGARLFDEASTAEERRTHRGNRRRLARRKYRLLLLEQLFEKEIRKIDDNFFVRLHESNLWADDKSKPSKFLLFNDTNFTDKDYLKKYPTIYHLRSDLIHNSTEHDIRLVFLALHHLIKYRGHFIYDNSANGDVKTLDEAVSDFEEYLNENDIEFNIENKKEFINVLSDKHLTKKEKKISLKKLYGDITDSENINISVLIEMLSGSSISLSNLFKDIEFDGKQNLSLDSDIEETLNDVVDILGDNIDLLIHAKEVYDIAVLTSSLGKHKYLCDAKVELFEKNKKDLMILKKYIKKNHPEDYKKIFSSPTEKKNYAAYSQTNSKNVCSQEEFCLFIKPYIRDMVKSENEDEVRIAKEVEDKSFLTKLKGTNNSVVPYQIHERELNQILKNIVAYLPFMNDEQEDISVVDKIKLIFKFKIPYYVGPLNTKSTRSWVYRSDEKIYPWNFSNVIDLDKTAHEFMNRLIGRCTYTNDPVLPMDSLLYSKYNVLNEINPIKVNGKAIPVEVKQAIYTDLFENSKKKVTRKSIYIYLLKNGYIEKEDIVSGIDIEIKSKLKSHHDFTQIVQENKCTPEEIERIIKGILVYSDDKSMLRRWLKNNIKGLSENDVKYLAKLNYKEWGRLSKTLLTDIYTINPEDGEACSILDIMWNTNATLMEILSNEKYQFKQNIENYKAENYDEKQNLHEELDDMYISPAARRSIWQALRIVDEIVDIKKSAPKKIFIEMAREKKSAMKKKRTESRKDTLLELYKSCKSQADGFYDEELFEKLSNESNSRLRRDQLYLYYTQMGRSMYTGKRIDFDKLINDKNTYDIDHIYPRSKIKDDSITNRVLVEKDINGEKTDIYPISEDIRQKMQPFWKILKEKGLINEEKYKRLTRNYELTDEELSSFVARQLVETQQSTKALATLLKKEYPSAKIVYSKAGNVSEFRNRKDKELPKFREINDLHHAKDAYLNIVVGNVYDTKFTEKFFNNIRNENYSLKRVFDFSVPGAWDAKGSTFNTIKKYMAKNNPIIAFAPYEVKGELFDQQIVPKGKGQFPIKQGKDIEKYGGYNKLSSAFLFAVEYKGKKARERSLETVYIKDVELYLQDPIKYCESVLGLKEPQIIKPKILMGSLFSINNKKLVVTGRSGKQYVCHHIYQLSINDEDSQYLKNIAKYLQEEPDGNIERQNILNITSVNNIKLFDVLCTKFNSNTYEIILNSLKNDVNEGREKFSELDILEQCNILLQLLKAFKCNRESSNLEKLNNKKQAGVIVIPHLFTKCSVFKVIHQSITGLFEKEMDLLK

SEQ ID NO: 653 - protein, 1062 aa, Ralstonia solanacearum
MAEMQYRWGLDIGTNSIGWAVIALIDGRPAGLVVTGSRIFSDGRNPKDGSSLAVERRGPRQMRRRRDRYLRRRDRFMQALIDAGLMPGDAAARKALVTENPYVLRQRGLDQALTLPEFGRALFHLNQRRGFQSNRKTDRASAKESGKVKSAIAAFRASMGSARTVGEALARRLEDGSPVRARMVGQGKDEHYELYIAREWIAQEFDALWASQQRFHAEVLTDAVRDRLRAILLFQRKLLPVPVGKCFLEPNQPRVAAALPSAQRFRLMQELNHLRVMTLADKQERPLSFQERNDLLAQLAARPKCGFDMLRKIVFGANKEAYRFTIESERRKELKGCDTAAKLAKASALGARWQALSLDEQDRLVCLLLDGENDAVLAAALREHYGLTDAQIDTLLGLSFEDGHMRLGRPALRRVLDALERGRDEQGLPLSYDKAVVAAGYPAHTADLENGERDALPYYGEVLWRYTQDAPTAKNDAERKFGKIANPTVHIGLNQLRKLVNALIQRYGKPAQIVVELARNLKAGLEEKERIKKQQTADLERNERIRQKLQDAGVPDNRENRLRMRLFEELGQGNGLGTSCIYSGRQISLQRLFSNDVQVDHILPFSKTLDDSFANKVLAQHDANRYKGNRGPFEAFGANRDGYVWDEIRTRAAVLPRNKRNRFAETAMQDWLHNEADFLARQLTDTAYLSRVARQYLTAICPKDDVYASPGRLTAMLRAKWGLNRVLDGVAEAQGRLAVKNRDDHRHHAIDAVVIGATDRAMLQQVATLAARAREQDAERLIGDMPTPWPNFLADVRAAVARCVVSHKPDHGPEGGLHKDTAYGIVEGPREDGLYRVQHRVSLFDITPENLSKVDCDAPLRAELDLIFKQDDVKARVAALTVLAERYGQRKVRLVEWMSVLPIRPRGDDGKTLPDSAPYKAYSGGSNYCYELFINERGRWDGELISTFRANQAAYRRFRNDPARFRRYTAGGRPLLMRLCINDYIAVGTAAERTIFRVVKMSENKITLAEHFEGGTLKQRDADKDDPFKYLTKSPGALRDLGARRIFVDLIGRVLDPGIKGD

SEQ ID NO: 654 - protein, 1059 aa, Wolinella succinogenes
MIERILGVDLGISSLGWAIVEYDKDDEAANRIIDCGVRLFTAAETPKKKESPNKARREARGIRRVLNRRRVRMNMIKKLFLRAGLIQDVDLDGEGGMFYSKANRADVWELRHDGLYRLLKGDELARVLIHIAKHRGYKFIGDDEADEESGKVKKAGVVLRQNFEAAGCRTVGEWLWRERGANGKKRNKHGDYEISIHRDLLVEEVEAIFVAQQEMRSTIATDALKAAYREIAFFVRPMQRIEKMVGHCTYFPEERRAPKSAPTAEKFIAISKFFSTVIIDNEGWEQKIIERKTLEELLDFAVSREKVEFRHLRKFLDLSDNEIFKGLHYKGKPKTAKKREATLFDPNEPTELEFDKVEAEKKAWISLRGAAKLREALGNEFYGRFVALGKHADEATKILTYYKDEGQKRRELTKLPLEAEMVERLVKIGFSDFLKLSLKAIRDILPAMESGARYDEAVLMLGVPHKEKSAILPPLNKTDIDILNPTVIRAFAQFRKVANALVRKYGAFDRVHFELAREINTKGEIEDIKESQRKNEKERKEAADWIAETSFQVPLTRKNILKKRLYIQQDGRCAYTGDVIELERLFDEGYCEIDHILPRSRSADDSFANKVLCLARANQQKTDRTPYEWFGHDAARWNAFETRTSAPSNRVRTGKGKIDRLLKKNFDENSEMAFKDRNLNDTRYMARAIKTYCEQYWVFKNSHTKAPVQVRSGKLTSVLRYQWGLESKDRESHTHHAVDAIIIAFSTQGMVQKLSEYYRFKETHREKERPKLAVPLANFRDAVEEATRIENTETVKEGVEVKRLLISRPPRARVTGQAHEQTAKPYPRIKQVKNKKKWRLAPIDEEKFESFKADRVASANQKNFYETSTIPRVDVYHKKGKFHLVPIYLHEMVLNELPNLSLGTNPEAMDENFFKFSIFKDDLISIQTQGTPKKPAKIIMGYFKNMHGANMVLSSINNSPCEGFTCTPVSMDKKHKDKCKLCPEENRIAGRCLQGFLDYWSQEGLRPPRKEFECDQGVKFALDVKKYQIDPLGYYYEVKQEKRLGTIPQMRSAKKLVKK

SEQ ID NO: 655 - protein, 1409 aa, Wolinella succinogenes
MLVSPISVDLGGKNTGFFSFTDSLDNSQSGTVIYDESFVLSQVGRRSKRHSKRNNLRNKLVKRLFLLILQEHHGLSIDVLPDEIRGLFNKRGYTYAGFELDEKKKDALESDTLKEFLSEKLQSIDRDSDVEDFLNQIASNAESFKDYKKGFEAVFASATHSPNKKLELKDELKSEYGENAKELLAGLRVTKEILDEFDKQENQGNLPRAKYFEELGEYIATNEKVKSFFDSNSLKLTDMTKLIGNISNYQLKELRRYFNDKEMEKGDIWIPNKLHKITERFVRSWHPKNDADRQRRAELMKDLKSKEIMELLTTTEPVMTIPPYDDMNNRGAVKCQTLRLNEEYLDKHLPNWRDIAKRLNHGKFNDDLADSTVKGYSEDSTLLHRLLDTSKEIDIYELRGKKPNELLVKTLGQSDANRLYGFAQNYYELIRQKVRAGIWVPVKNKDDSLNLEDNSNMLKRCNHNPPHKKNQIHNLVAGILGVKLDEAKFAEFEKELWSAKVGNKKLSAYCKNIEELRKTHGNTFKIDIEELRKKDPAELSKEEKAKLRLTDDVILNEWSQKIANFFDIDDKHRQRFNNLFSMAQLHTVIDTPRSGFSSTCKRCTAENRFRSETAFYNDETGEFHKKATATCQRLPADTQRPFSGKIERYIDKLGYELAKIKAKELEGMEAKEIKVPIILEQNAFEYEESLRKSKTGSNDRVINSKKDRDGKKLAKAKENAEDRLKDKDKRIKAFSSGICPYCGDTIGDDGEIDHILPRSHTLKIYGTVFNPEGNLIYVHQKCNQAKADSIYKLSDIKAGVSAQWIEEQVANIKGYKTFSVLSAEQQKAFRYALFLQNDNEAYKKVVDWLRTDQSARVNGTQKYLAKKIQEKLTKMLPNKHLSFEFILADATEVSELRRQYARQNPLLAKAEKQAPSSHAIDAVMAFVARYQKVFKDGTPPNADEVAKLAMLDSWNPASNEPLTKGLSTNQKIEKMIKSGDYGQKNMREVFGKSIFGENAIGERYKPIVVQEGGYYIGYPATVKKGYELKNCKVVTSKNDIAKLEKIIKNQDLISLKENQYIKIFSINKQTISELSNRYFNMNYKNLVERDKEIVGLLEFIVENCRYYTKKVDVKFAPKYIHETKYPFYDDWRRFDEAWRYLQENQNKTSSKDRFVIDKSSLNEYYQPDKNEYKLDVDTQPIWDDFCRWYFLDRYKTANDKKSIRIKARKTFSLLAESGVQGKVFRAKRKIPTGYAYQALPMDNNVIAGDYANILLEANSKTLSLVPKSGISIEKQLDKKLDVIKKTDVRGLAIDNNSFFNADFDTHGIRLIVENTSVKVGNFPISAIDKSAKRMIFRALFEKEKGKRKKKTTISFKESGPVQDYLKVFLKKIVKIQLRTDGSISNIVVRKNAADFTLSFRSEHIQKLLK

SEQ ID NO: 656 - protein, 1348 aa, Finegoldia magna
MKSEKKYYIGLDVGTNSVGWAVTDEFYNILRAKGKDLWGVRLFEKAKTAADTRTFRSGRRRNDRKGVRLQILREIFEDEIKKVDKDFYDRLDESKFWAEDKKVSGKYSLFNDKNFSDKQYFEKFPTIFHLRKYLMEEHGKVDIRYYFLAINQMMKRRGHFLIDGQISHVTDDKPLKQQLILLINDLLKIELEEEFMDSIFEILADVNEKKTEKKNILKELINAQDFNKQEGKILYSIFESIVTGKAKIKNIISDEDILEKIKEDNKEDFVLTGDSYEENLQYFEEVLQENITLFNTLKSAYDFVILQSILKGKSTLSDAQVERYDEHKKDLEILKKVIKKYDEDGKLFKQVFKEDNGNGYVSYIGYYLNKNKKITAKKKISNIEFTKYVKGILEKQCDCEDEDVKYLLGKIEQENFLLKQISSINSVIPHQIHLFELDKILENLAKYYPSFNNKKEEFTKIEKIRKTFTFRIPYYVGPLNDYHKNNGGNAWIFRNKGEKIRPWNFEKIVDLHKSEEEFIKRMLNQCTYLPEETVLPKSSILYSEYMVLNELNNLRINGKPIDTDVKLKLIEELFKKKTKVTLKSIRDYMIRNNFADKEDFDNSEKNLEIVSNMKSYIDFNNILGDKFELEMVEDLIEKITIHTGNKKLLKKYIEETYPDLSSSQIQKIINLKYKDWGRLSRKLLDGITGTNIETGEIDTVINFLRNSSDNLMQIIGSQNYSFNNDIDKLRKKYIPQEISYEVVENLYVSPSVKKMIWQVIRITEEITKVMGYDPDKIFIEMAKSEEGKKTTISRKNKLLALYKAIKKDERDSQYEKLLTGLNKLDDSDLRSRKLYLYYTQMGRDMYTGEKIDLDKLFDSTHYDKDHIIPQSMKKDDSIINNLVLVNKNANQTTKGNIYPVPSSIRNNPKIYNYWKYLMEKEFISKEKYNRLIRNTPLTNEELGGFINRQLVETRQSTKAIKELFEKFYKKSKIIPVKAILASDLRKDMNTLKSREVNDLHHAHDAFLNIVAGDVWNREFTSNPINYVKENREGDKVKYSLSKYFTRPRKSKGKVIWTPEKGRKLIVDTLNKPSVLISNESHVKKGELFNATIAGKKDYKKGKIYLPLKKDDRLQDVSKYGGYKAINGAFFFLVEHTKSKKRIRSIELFPLHLLSKFYEDKNTVLDYAINVLQLQDPKIIIDKINYRTEIIIDNFSYLISTKSNDGSITVKPNEQMYWRVDEISNLKKIENKYKKDAILTEEDRKIMESYIDKIYQQFKAGKYKNRRTTDTIIEKYEIIDLDTLDNKQLYQLLVAFISLSYKTSNNAVDFTVIGLGTECGKPRITNLPDNTYLVYKSITGIYEKRIRIK

SEQ ID NO: 657 - protein, 1110 aa, Sphingobium sp.
MAEGKKRIWRLGADLGANSLGWAAIELSAPVNGKPIAILAAGSRIFSDGRDPKSGASLAVDRRDARAMRRRRDRFKQRQKALIKYLIADGLFPADEAARNAMAAIDPYAVRARALDEALSLPELGRALFHLNQRRGFKSNRKADRKADDDAGKIAIGIDRTRDAIAEDEADAGAEPGSWTFGKWLHERRLKGQSVRTRLRPESGEDAKGDGYDFYPDRALMEEEFDAIWAAQAPHHPDVLTNDVHDRLHEIIFYQRPLKAPQVGMCSLIPGDRRLPKAHPLFQRRRLLEELNALMIVRPGEVAQRLTREERDILLLKLKDKNKVSFATLRKALKLDPDARFNKESEDRTDLKGDEVAAVMGSKTRFGNLWVHLSIEAQWDVLARLDAVESDAEDAAFCAWLVETYALTPEQARAVANAPLPPGYGRFGETATRKLIEALRDGKKDDRVLVYSEAVTEAGLGHHSDRRTGEVFEDAKGRPQLPYYGVALERHIMPGTGDPSDPEEMRVGRLTNPTVHIGLNQLRRILNVLIRAYGPPAEIAIELARELKLTDEDKKRINRENNDNRIAAERRSEKLLAIGQADSGANRALLKLWEELNPANVLDRRCIYSGRQISIDMLFSAAVEVDHILPFAATLDDSNGNKIVCLREANREKRKRSPHDAWGHSARWDEIAARAAQLPRNKRWRFEPDAMDKFRDEGGFQARHLVDTQYLARLSREYLATLYPEKGEGSGHIWVSPGRLTEMVRRKLGLNDLLPDHNFGGGADQAKNRLDHRHHAIDAVVVAIVDRGMLNAIARASGQEGAEGRERIIIPEPWDGFRDALRETVNRITVSHRTDHGTASKAGLPKGKDATAGRLHNDTAYGFTGDTDAKGNSIVVRRVPLSSFKKLADLDRIRDADLKAALYQHLNGLEGKAFEKALAEFHKLEWHNFGGVRRVRVTEPLTVIPIKDRNGRIYKGYKGDSNYRYDVWELPDGKWVTNWKNEAGEAMSSVISMFDAHQSSEPPRPHPAARKILSLHQNDLLAIEREGEDRKLMRVVKFGQSGQITLAEHQQAGDLKKRDAVSNDDDPFKYFAPTSGGLKKVKARQVRIDEIGRVLDPGFPARTARRKTRG

SEQ ID NO: 658 - protein, 995 aa, Campylobacter peloridis
MKILGFDIGINSIGWAFVENDELKDCGVRIFTKAENPKNKESLALPRRNARSNRRRLKRRKSRLIAIKHILAKELNLNYKDYIANDGELPKAYEGKLTNVYELRYKALNQKLEAKDLARVILHIAKHRGYMNKNEKKSNDSEKGKILSALKNNALKLEKYQSVGEYFYKEFFQKYKENTKNFIKIRNTKDNYNNCVLASDLEKELKLILEKQKEFGYSYNDDFIKEIINIAFFQRPLKDFSHLVGSCTFFEEEKRACKNSYSAWEFVALSKIINELKRLEKISGELISAQTINEILNHILDKGNITYKKFRSCINLHESIEFKSLNYDKDNAESAKLVDFKKLIEFKKALGEHSFNRQELDEIATHITLIKDNDKLKTALEKYNLNNEQINALLEIEFNDHINLSFKALNLILPLMREGKRYDEACEIVNLKSKTSNQKQDLLPAFCDSIFSQELSNPVVNRAISEYRKVLNALLKKYGKVHKIHLELARDVGLSKKAREKIEKEQKENKEINDWALDECEKFGLKANNKNILKLKLWKEQKEICAYSGKKISIEHLKDEKALEVDHIYPYSRSFDDSYMNKVLVFTKENQEKLNKTPFEAFGKNIERWNKIQALAQNLPYKKKNKILDENFKDKQQQDFISRNLNDTRYIATLIAKYTKEYLNFLPLNENENTNLKSGEKGSKIHVQTINGMLTSVLRHTWGFDKKDRNNHLHHALDAIIVAYSTNSIIKAFSDFKKNQELLKAKLYAKELTSDNYKHQAKFFEPFEGFREKILNKIDEIFVSKPPRKRARGTLHKETFYPEETMIKKYNSKEGLNIALNCGKIRKIGTKYVENDTMVRLDIFKKQNKFYAIPIYTMDFALGILPNKIVIAGKDKNNNPKQWQEIDESYEFCFSLYKNDLILLQKKDMQEAEFAYYNSFDIDSSRINIKKHDNKFENLTDNQKLLFTNQEKNRTGIQNLKIFEKYIVTPLGDKIKADFQPRQNISLKTSKKYGL

SEQ ID NO: 659 - protein, 1072 aa, Neisseria arctica
MSISHFRLKQLNYILGLDLGIASVGWAVVEIDTEENPTRLIDVGVRTFERAEVPKTGDSLAAARRQARSARRLIRRRTHRLLRARRLLKREGILHADDLNAEGLVKELPNTPWQLRVDGLDRKLMPKEWAAVLLHLVKHRGYLSQRKNESEGADKELGRLLAGVHENHQALQSSEYRTPAELAVKKFQAQSGHIRNQRGDYTHTFDRKDLQQELHQLFAAQQKYGNPFVSDGLKQGIETLLMQQRPALSGDAVQKMLGRCTFETEEFKAAKHTYSAERFIWLTKLNNLRIQENGNERCLTAQERGQIIDLPYKKAKLTYAQVRKELSLPENAFFKGLRYGKENAETAALMEMKAYHAIRKALEKAGLKTEWQGLACKPELLDAIGTVFSLYKTDEDISTRLQGQLSEDVINALLAGLNFDKFIQLSLKALSKILPLMEQGQRYDEAHAALYVRSTPQPQRLLPQITADEICNPVVLRTLSQARKVINAIVRRYGSPARIHIETGREVGKSFKDRQEIQKRQEDNHKERKQAAEKFLEYFPNFVGQPKAKDILKLRLYQHQHGQCLYSGKTLDICRLNEKGYAEIDHALPFSRTWDDSFNNKVLVLAGENQNKGNQTPYEWLGGASNSPRWQEFVARVGSSRFHHSKKQRILLRQLDEEGFKERNLNDTRYVARFLCKFIEENMLLLGRGKRRVFASNGQITSFLRSRWGLRKVREENDRHHALDAVVVACSTVAIQQRITYFVRQREMNIFDGELIDKETSEVSRPYFPQPWDFFRQEVMMRVFGKPDGDPSFPEADTKETLCTLLETRLSSRPQAVHEYVTPLFVSRAPTRKMSGQGHKETVKSAKLLHEGKSVLRVPLTQLKPNLLEKMVNRDREPQLYEALKERLAAYGNDPAKAFATEFRKKGGQLVKAVRVEDTQKSGVLLHKGTGVADNATMVRVDVFEKSGKYYLVPIYSWQVAQGILPNKAVIQGKDEKNWDEMDETYTFKFSMYPNDLVEINTGKQRLFGYYIGLDRATGAISIREHDLDNFKGKNGIYRVGVKTAISFKKYQTDELGKVVVPCRPKKRLPVR

SEQ ID NO: 660 - protein, 1130 aa, Streptococcus equinus
MSNGKILGLDIGVASVGVGIIDAKTGKVIHASSRLFSAANAENNAERRGFRGARRLTRRKKHRIKRVRDLFEKYEIVTDFSNLNLNPYELRVKGLTEQLTNEELFAALRTIAKRRGISYLDDAEDDSTGSSDYAKSIEENRRLLKNMTPGQIQLERLEKYGQLRGNFTVYDENGEAHRLINVFSTSDYKNEARKILETQSNYNKQITDEFIEDYIEILTQKRKYYHGPGNEKSRTDYGRYRTDGTTLENIFGILIGKCTFYPDEYRTSKASYTAQEYNFLNDLNNLKVPTETGKLSTEQKHYLVDFAKSSKALGVAKLLKEIAKIVECSVDDIKGYREDNKGKPDLHTFEPYRKLKFNLSLIDIDELSRETLDKLADILTLNTEREGIEDAIKRNLPNQFTEEQIVELVNVRKNQSSAFNKGWHSFSVKLMNELIPELYASSEEQMTILTRLEKFKVNKKSSENTKTINEKEITDEIYNPVVAKSVSQTVKIINAAVKKYGDFDKIVIEMPRDKNADDEKKFIDKKQKENAKEVEDALKRAAYLYNGTDKLPDGVFHGNKQLKTKIRLWYQQGERCLYSGKPISIQDLVHNSNNFEIDHILPLSLSFDDSLANKVLVYAWTNQEKGQKTPYQVIDSMDAAWSFREMKDYVLNQKGIGKKKREYLLTTENIDKIEVKKKFIERNLVDTRYASRVVLNSIQAALKELDKDTKVSVIRGQFTSQLRRKWKIDKSRETYHHHAVDALIIAASSQLKLWQKQENPMFVDYGENQVVNKETGEILSVSDDDYKELVFQPPYQGFVNTISSKAFEDEILFSYQVDSKYNRKVSDATIYSTRKAKLGKDKKEETYVLGKIKDIYSQDGFDAFIKRYKKDKTQFLMYQKDPVTWENVIEVILRDYPSEKLSEDGKKNVKCNPFEEYRRENGLICKYSKKGKGTPIKSLKYYDKKLGNCIDITPKGSKNEVVLQSLNPWRADLYFNPDTLKYELMGLKYSDLSFEKGTGKYHISQERYDEIKVKEGIGKNSEFKFTLYRNDLILIKDTESGEEELYRFLSRTMPNVKHYVELKPYDKERYDGGQELMKVFGNVANGGQCLKSLNKSNLSIYKVRTDVLGNKFFIKKEGDKPKLDFKNNKK

SEQ ID NO: 661 - protein, 861 aa, Campylobacter jejuni
MARILAFDIGISSIGWAFSENDELKDCGVRIFTKAENPKTGESLALPRRLARSARKRLARRKARLNHLKHLIANEFKLNYEDYQSFDESLAKAYKGSLISPYELRFRALNELLSKQDFARVILHIAKRRGYDDIKNNGDEEKSEILKAIKQNEEKLVNYQSVGEYLYKEYFQKFKENSKEFINVRNKKESYERCITQSFLKDELKLIFQKQREFGFSFSKKFEEEVLSVAFYKRALKDFSHLVGNCSFFTDEKRAPKNSPLAFMFVALTRIINILNNLKNTEGILYTKDDLNALLNEVLKNGTLTYKQTKKLLGLSDDYEFKGEKGTYFIEFKKYKEFIKALGEHNLSQDDLNEIAKDITLIKDEIKLKKALAKYDLNQNQIDSLSKLEFKDHLNISFKALKLITPLMLEGKKYDEACNELNLKVAINEDKKDFLPAFNETYYKDEVTNPVVLRAIKEYRKILNALLKKYGKVHKINIELAREVGKNHSQRAKIEKEQNENYKAKKDAEIECEKLGLKINSKNILKLRLFKEQKEFCAYSGEKIKLSDLQDEKMLEIDHIYPYSRSFDDSYMNKVLVFTKQNQEKLNKTPFEAFGNDSTKWQKIEVLAKNLPEKKQKRILDKNYKDKEQKDFKDRNLNDTRYIARLVLNYTKDYLDFLPLSDDENTKLNDTQKGSKVHVEAKSGMLTSALRHTWGFSAKDRNNHLHHAIDAAIIAYANNSIVKAFSDFKKEQESNSVELYAKKISELDYKNKRKFFEPFSGFRQKVLDKIDEIFVSKPERKKPSGALHEETFRKEEEFYQSYGGKEGVLKALELGKIRKVNGKIVKNGDMFRVDIFKHKKTNKFLCCANLYYGFCFKSITK

SEQ ID NO: 662 - protein, 1099 aa, unidentified
  source 1..1099: note = Corynebacterium
MSLSYRVGIDVGTYSLGCTAIEVDENDQPVKILSAVSLIHDSGLDPDQQKRAVTRLASSGVARRTRRLYRRRRKRMIKLEKFLKAQGWETLPFEHYSDPYLPWKARVELVNSFIHDDEERGRYLSIALRHIANHRGWRNPYWKVSSLYAPSEPSEAFQQIRKELEAATGRAIPHDATVGQLISFAQLGTDRLRGGGKKKDDKKPANEVKQAVISARLHQIDHAREINEICRVQKIDDTLRKNILDLVFEAESPKGAQQGRVGKDPLQPSQDRALKASDVFQQYRIAALTGNLRINRGGDTSPLDRDERLIVFNYLVNLSHKKEPTWLDIAELLRIDRGQLRGTAIMTDDGERAGARPPVHDTNRTILGCKVKPLAAWWERAADDERAAMLKSLSNAEVDDFDSPEGAQVQAFFAELDETEHEKLDSLHLPMGRAAYCEDTLKRLTSRMLDENLDLYAARLAEFNIPKDWTPPAPRIGEPVGNPAVDRVLKGVARWLEAAADVWGAPKSVVIEHVRDGFVSKSKANEIDRENNARHRRNQKLFQDMQEKLGIEGKPRSADLWRFQSVQRQNCQCAYCGEPITYSTCEMDHIVPRAGQGSTNTRDNLVAVCHRCNLSKKNFPFAVWAAQSGIPGVSVKEALDRTRHWAEDSGMSAKDFNKFRTSVRERLKRTAMDEPIDARSMESVAWMANELRGRVARRFQDNGTTVSVYRGALTAEARRASGISGQLRFIDGTGKSRLDRRHHAVDAAVVAFTQNYVAETLAIRSNKKREAELLRSAPQWKEFTGADEAHRAAWNAWLPKMRRLAMLLQQALDEDRVVVTSNLRLRIGNGRAHEDTIGELKKIRVGDAISATDIDRASTEALWCALTREEDFDPKEGLPENPERRIRVHGTWYDADDEIEVFPGRAGAIKVRGGYAELSRFHHARIYRIPGKKAPVFSMLRVYNVDLMQHRHEDLFSVEIKPQTMSVRQAEPKLREALSDGTAEYLGWLVVDDELVIDTSNFNTGQIAEVQSEFGQIQRWRLDGFDSNSKLRLRPLYMSAEGLPSDASQGSKKVIDTSGWRTAINKVFSQGNVTVIRRDALGRVRLTSKAHLPVSWRAE

SEQ ID NO: 663 - protein, 1395 aa, Treponema denticola; identical to SEQ ID NO: 163

SEQ ID NO: 664 - protein, 1035 aa, Gallibacterium anatis
MEQLNYILGLDIGIASVGWAVVEIDHNEDPIRLIDVGVRTFNKAEVAKTGESLSLIRRLARGSRRLVRRKKMRLLTAKRLLKSEGILSDLDFNKGAILNLPNNCWELRVKGLDKKLSDKEWAAVLLHIIKHRGYLSQRKHDRKTDDKELGALLSGVSKNHSLLEEGEFRTAAELAINVFCNSKGHIRNQWGDYSHTFSRLDLQKEIKQLFVSQRELGNPYTSSSFEENIISLLMKQKEAISGNDILKMLGKCTYEKNEYKAAKNTYSAERFVWLTKLNNLRIVDDGVERALNSSERKLLIDEPYKKAKLTYAQVRKILELPDSAVFKGVRYFADNAESSTLMEMKFWHSIRKALESNNLKDEWLVLKTKPELLDEIGTGFSIYKTDDDITSYLSNKLDKKVLDILLVEVSFDKFIELSLKCLRKIIPLMEKGYRYDEAYKYIYGEVNIEYNLNDIKNPVVLRSFSQSRKVINAVIRLYGSPARIHIETARDIGKSFKERKAIEKQQEKNRLEKVRAAEHFKQLFPNYVGEPKAKDILKVRLYEQQQGKCLYSGKILDIKRLMEHGYVEIDHALPFSRTWDDSFNNKVLVLANENQNKGNKTPYEWFNGKDNSDSWKRFLALVNNSGFSAVKKQHILMKEIDEEGFKQRNLNDTRYITRFLCNWVENNIPLLGKGVKRVFAPQGKITALLRSNWGIRKVREDNDRHHAIDAIVVACTTVSIQQRITNYVKNSEINRKIKRQNYLKFPEPWKFFREDISIRVFSNNPIEELKQQLSDRPEANHQFVTPLFVSRAPVRKMTGQGHEDTIRSAKRISEGISVLRVPLTKLNDKSLELMVNREREKELYDALKQRLLEFKNDPEKAFAEPFYKKGGQQVKTVRIERVQKNGVLVNNNTGIADNGNIVRVDVFLKKKKYFLVPIYSWQVAKGILPNKAIVAHKNECDWADMDGSAQFLFSLYTNDLIEVVLKDSTILGYFSSIDRATAALIIKEPDMEKSKGKEGIHRVGVKTARSFIKYNVDVLGKNISRCRKAKRLPVR

SEQ ID NO: 665 - protein, 1510 aa, unidentified
  source 1..1510: note = Bacteroides
MKRILGLDLGTNSIGWALVDSEEQRILGMGSRIIPMDQGVLDTFSGGNPVETQTAARTVYRGTRRLRERALLRRERLIRVLNMMKFLPEHYASQIDFEKRLGQFFDEKEPKLAWKQNDEGRFEFIFQQSFNEMIEEFKNKGVVREDKKIPYDWTIYYLRKKALSQEIEKEELAWILLNFNQKRGYYQLRGEEEEENPNKLVEYYSLKIVDVIADEKPNSKSDIWYSLHLENGWIYRRSSKIPLFGWKDKTRDFIVTTDLNDDGTVKKDKEGIEKRSFRAPSENDWVLLKKKTESDIEKSHKTVGAYVYETLLQNPMQKVRGKLVRTIERKFYKDELKQILEKQREFHPELRDEDLYNDCVRELYRSNETYQFILSKRDFVHLFLDDILFYQRPLRSQKSAIGDCILEFKTYKDKDGNNIKEYLKVISKSNPLYQEFRIWQWLYNLKIYRKEDDEDVTLQFIANIEDKEQLFDFLSNRKSIEQKPLLEYLIKAKGLKKQVKTEAYRWNYVEDKIYPCSETKTMISTRLAKVENIPDNFFTKEIEQKLWHIIYSVTDKNEFEKALRTFAKKYDLDIASFVDNFKKIPPFKNEYGSFSEKAIKKLLPLMRLGKYWKWNDIDNNTQNRISKIITGEYDEEIKDIVREKSIALTNENDFQGLQLWLAQYLVYGRHSEADIAGKWHSVADLEKYLNEFKQHSLRNPIVEQIITETLRVVRDIWRKYGQGAENFFSEIHVELGRDMKNTADERKKIVNVVTENENTNLRIKALLMELKNNSDGKLEVENVRPYSPTQQDILKIYEEYAISTGLDNEKDEKVKEDIKKISRVAQPTTTELQRYKLWLEQKYCSPYTGKVIPLGKLFTEEYQIEHIIPKSRYYDDSFSNKVICEAAVNKLKDKCLGLEFIKNYHGQIVETGFGQKVTIFDEEAYQNFVKQHYAYNHSKRTKLLLEEIPEKMIERQMNDTRYISKFVLPLLSNLVRAKENDNGVNSKNVLPVNGKITTMLKQDWGLNDVWNDLILPRFVRMNELAKTIAFTSWNEQHQKYLPTVPLELSKGFQKKRIDHRHHAMDALVIACATRDHVNLLNNKHANTDTIRYDLQRKLRLFERVTYIDPQTKNNVTKDIPKEFKKPWDNFTVDARNELEKIIVSFKQNLRIINKATNIYTKYENGKKIKVGQKGLNWAIRKPLHKETVFAKVSLRKRKTVRLSEALKDWKKIVDKKLKQEIKRLTCQYGKFDVDTILRYFKDRKYQFGEVDVSKVKMYYFDEENAAVRKNVDTSFTEKFIQGSVTDTGIQKILLNHLEAKGNKVEIAFSPEGIEEMNKNIIQLNEGKLHLPIFKVRVYETIGNKFSVGVKGNKKDKYVEAAKGTNLFFAIYVDENGIRSYETIPLNIVIERLKQGLSVVPEKNRKEHSLLFYLSPNDLVYVPIEDERENIHAVNLDQLNNEQRKRIYKMVSCTGSECHFVPYYVASPIVNKVEYSSLNKIGRSLTGEMIKDVCIKLKVDRLGNIKGISGL

SEQ ID NO: 666 - protein, 1054 aa, Staphylococcus lugdunensis
MNQKFILGLDIGITSVGYGLIDYETKNIIDAGVRLFPEANVENNEGRRSKRGSRRLKRRRIHRLERVKKLLEDYNLLDQSQIPQSTNPYAIRVKGLSEALSKDELVIALLHIAKRRGIHKIDVIDSNDDVGNELSTKEQLNKNSKLLKDKFVCQIQLERMNEGQVRGEKNRFKTADIIKEIIQLLNVQKNFHQLDENFINKYIELVEMRREYFEGPGKGSPYGWEGDPKAWYETLMGHCTYFPDELRSVKYAYSADLFNALNDLNNLVIQRDGLSKLEYHEKYHIIENVFKQKKKPTLKQIANEINVNPEDIKGYRITKSGKPQFTEFKLYHDLKSVLFDQSILENEDVLDQIAEILTIYQDKDSIKSKLTELDILLNEEDKENIAQLTGYTGTHRLSLKCIRLVLEEQWYSSRNQMEIFTHLNIKPKKINLTAANKIPKAMIDEFILSPVVKRTFGQAINLINKIIEKYGVPEDIIIELARENNSKDKQKFINEMQKKNENTRKRINEIIGKYGNQNAKRLVEKIRLHDEQEGKCLYSLESIPLEDLLNNPNHYEVDHIIPRSVSFDNSYHNKVLVKQSENSKKSNLTPYQYFNSGKSKLSYNQFKQHILNLSKSQDRISKKKKEYLLEERDINKFEVQKEFINRNLVDTRYATRELTNYLKAYFSANNMNVKVKTINGSFTDYLRKVWKFKKERNHGYKHHAEDALIIANADFLFKENKKLKAVNSVLEKPEIESKQLDIQVDSEDNYSEMFIIPKQVQDIKDFRNFKYSHRVDKKPNRQLINDTLYSTRKKDNSTYIVQTIKDIYAKDNTTLKKQFDKSPEKFLMYQHDPRTFEKLEVIMKQYANEKNPLAKYHEETGEYLTKYSKKNNGPIVKSLKYIGNKLGSHLDVTHQFKSSTKKLVKLSIKPYRFDVYLTDKGYKFITISYLDVLKKDNYYYIPEQKYDKLKLGKAIDKNAKFIASFYKNDLIKLDGEIYKIIGVNSDTRNMIELDLPDIRYKEYCELNNIKGEPRIKKTIGKKVNSIEKLTTDVLGNVFTNTQYTKPQLLFKRGN

SEQ ID NO: 667 - protein, 1079 aa, Dinoroseobacter shibae
MRLGLDIGTSSIGWWLYETDGAGSDARITGVVDGGVRIFSDGRDPKSGASLAVDRRAARAMRRRRDRYLRRRATLMKVLAETGLMPADPAEAKALEALDPFALRAAGLDEPLPLPHLGRALFHLNQRRGFKSNRKTDRGDNESGKIKDATARLDMEMMANGARTYGEFLHKRRQKATDPRHVPSVRTRLSIANRGGPDGKEEAGYDFYPDRRHLEEEFHKLWAAQGAHHPELTETLRDLLFEKIFFQRPLKEPEVGLCLFSGHHGVPPKDPRLPKAHPLTQRRVLYETVNQLRVTADGREARPLTREERDQVIHALDNKKPTKSLSSMVLKLPALAKVLKLRDGERFTLETGVRDAIACDPLRASPAHPDRFGPRWSILDADAQWEVISRIRRVQSDAEHAALVDWLTEAHGLDRAHAEATAHAPLPDGYGRLGLTATTRILYQLTADVVTYADAVKACGWHHSDGRTGECFDRLPYYGEVLERHVIPGSYHPDDDDITRFGRITNPTVHIGLNQLRRLVNRIIETHGKPHQIVVELARDLKKSEEQKRADIKRIRDTTEAAKKRSEKLEELEIEDNGRNRMLLRLWEDLNPDDAMRRFCPYTGTRISAAMIFDGSCDVDHILPYSRTLDDSFPNRTLCLREANRQKRNQTPWQAWGDTPHWHAIAANLKNLPENKRWRFAPDAMTRFEGENGFLDRALKDTQYLARISRSYLDTLFTKGGHVWVVPGRFTEMLRRHWGLNSLLSDAGRGAVKAKNRTDHRHHAIDAAVIAATDPGLLNRISRAAGQGEAAGQSAELIARDTPPPWEGFRDDLRVRLDRIIVSHRADHGRIDHAARKQGRDSTAGQLHQETAYSIVDDIHVASRTDLLSLKPAQLLDEPGRSGQVRDPQLRKALRVATGGKTGKDFENALRYFASKPGPYQAIRRVRIIKPLQAQARVPVPAQDPIKAYQGGSNHLFEIWRLPDGEIEAQVITSFEAHTLEGEKRPHPAAKRLLRVHKGDMVALERDGRRVVGHVQKMDIANGLFIVPHNEANADTRNNDKSDPFKWIQIGARPAIASGIRRVSVDEIGRLRDGGTRPI

SEQ ID NO: 668 - protein, 1226 aa, Mycoplasma mobile
MNKKVVLGLDLGIASVGWCLTDISQKEDNKFPIILHGVRLFETVDDSDDKLLNETRRKKRGQRRRNRRLFTRKRDFIKYLIDNNIIELEFDKNPKILVRNFIEKYINPFSKNLELKYKSVTNLPIGFHNLRKAAINEKYKLDKSELIVLLYFYLSLRGAFFDNPEDTKSKEMNKNEIEIFDKNESIKNAEFPIDKIIEFYKISGKIRSTINLKFGHQDYLKEIKQVFEKQNIDFMNYEKFAMEEKSFFSRIRNYSEGPGNEKSFSKYGLYANENGNPELIINEKGQKIYTKIFKTLWESKIGKCSYDKKLYRAPKNSFSAKVFDITNKLTDWKHKNEYISERLKRKILLSRFLNKDSKSAVEKILKEENIKFENLSEIAYNKDDNKINLPIINAYHSLTTIFKKHLINFENYLISNENDLSKLMSFYKQQSEKLFVPNEKGSYEINQNNNVLHIFDAISNILNKFSTIQDRIRILEGYFEFSNLKKDVKSSEIYSEIAKLREFSGTSSLSFGAYYKFIPNLISEGSKNYSTISYEEKALQNQKNNFSHSNLFEKTWVEDLIASPTVKRSLRQTMNLLKEIFKYSEKNNLEIEKIVVEVTRSSNNKHERKKIEGINKYRKEKYEELKKVYDLPNENTTLLKKLWLLRQQQGYDAYSLRKIEANDVINKPWNYDIDHIVPRSISFDDSFSNLVIVNKLDNAKKSNDLSAKQFIEKIYGIEKLKEAKENWGNWYLRNANGKAFNDKGKFIKLYTIDNLDEFDNSDFINRNLSDTSYITNALVNHLTFSNSKYKYSVVSVNGKQTSNLRNQIAFVGIKNNKETEREWKRPEGFKSINSNDFLIREEGKNDVKDDVLIKDRSFNGHHAEDAYFITIISQYFRSFKRIERLNVNYRKETRELDDLEKNNIKFKEKASFDNFLLINALDELNEKLNQMRFSRMVITKKNTQLFNETLYSGKYDKGKNTIKKVEKLNLLDNRTDKIKKIEEFFDEDKLKENELTKLHIFNHDKNLYETLKIIWNEVKIEIKNKNLNEKNYFKYFVNKKLQEGKISFNEWVPILDNDFKIIRKIRYIKFSSEEKETDEIIFSQSNFLKIDQRQNFSFHNTLYWVQIWVYKNQKDQYCFISIDARNSKFEKDEIKINYEKLKTQKEKLQIINEEPILKINKGDLFENEEKELFYIVGRDEKPQKLEIKYILGKKIKDQKQIQKPVKKYFPNWKKVNLTYMGEIFKK

SEQ ID NO: 669 - protein, 1381 aa, Streptococcus iniae
MHFKKVLAKRRKYMRKPYSIGLDIGTNSVGWAVITDDYKVPSKKMRIQGTTDRTSIKKNLIGALLFDNGETAEATRLKRTTRRRYTRRKYRIKELQKIFSSEMNELDIAFFPRLSESFLVSDDKEFENHPIFGNLKDEITYHNDYPTIYHLRQTLADSDQKADLRLIYLALAHIIKFRGHFLIEGNLDSENTDVHVLFLNLVNIYNNLFEEDIVETASIDAEKILTSKTSKSRRLENLIAEIPNQKRNMLFGNLVSLALGLTPNFKTNFELLEDAKLQISKDSYEEDLDNLLAQIGDQYADLFIAAKKLSDAILLSDIITVKGASTKAPLSASMVQRYEEHQQDLALLKNLVKKQIPEKYKEIFDNKEKNGYAGYIDGKTSQEEFYKYIKPILLKLDGTEKLISKLEREDFLRKQRTFDNGSIPHQIHLNELKAIIRRQEKFYPFLKENQKKIEKLFTFKIPYYVGPLANGQSSFAWLKRQSNESITPWNFEEVVDQEASARAFIERMTNFDTYLPEEKVLPKHSPLYEMFMVYNELTKVKYQTEGMKRPVFLSSEDKEEIVNLLFKKERKVTVKQLKEEYFSKMKCFHTVTILGVEDRFNASLGTYHDLLKIFKDKAFLDDEANQDILEEIVWTLTLFEDQAMIERRLVKYADVFEKSVLKKLKKRHYTGWGRLSQKLINGIKDKQTGKTILGFLKDDGVANRNFMQLINDSSLDFAKIIKNEQEKTIKNESLEETIANLAGSPAIKKGILQSIKIVDEIVKIMGQNPDNIVIEMARENQSTMQGIKNSRQRLRKLEEVHKNTGSKILKEYNVSNTQLQSDRLYLYLLQDGKDMYTGKELDYDNLSQYDIDHIIPQSFIKDNSIDNTVLTTQASNRGKSDNVPNIETVNKMKSFWYKQLKSGAISQRKFDHLTKAERGALSDFDKAGFIKRQLVETRQITKHVAQILDSRFNSNLTEDSKSNRNVKIITLKSKMVSDFRKDFGFYKLREVNDYHHAQDAYLNAVVGTALLKKYPKLEAEFVYGDYKHYDLAKLMIQPDSSLGKATTRMFFYSNLMNFFKKEIKLADDTIFTRPQIEVNTETGEIVWDKVKDMQTIRKVMSYPQVNIVMKTEVQTGGFSKESIWPKGDSDKLIARKKSWDPKKYGGFDSPIIAYSVLVVAKIAKGKTQKLKTIKELVGIKIMEQDEFEKDPIAFLEKKGYQDIQTSSIIKLPKYSLFELENGRKRLLASAKELQKGNELALPNKYVKFLYLASHYTKFTGKEEDREKKRSYVESHLYYFDEIMQIIVEYSNRYILADSNLIKIQNLYKEKDNFSIEEQAINMLNLFTFTDLGAPSAFKFFNGDIDRKRYSSTNEIINSTLIYQSPTGLYETRIDLSKLGGK

SEQ ID NO: 670 - protein, 1448 aa, Capnocytophaga cynodegmi
MKHILGLDLGTNSIGWAVVKEAQNDNEQSEIVDVGVRVNPLTTDEKTNFEKGKPISTNADRTLKRSARRNLQRYKLRRKELIELLKEHQLISENTILTENGKGTTFQTLELRAKSAKEKISLEELARVFLTINKKRGYKSSRKAKNEDEGQLIDGMEIAKRLYEENLTTGQLSLQLLKEGKKSLPDYYRSDLQFELDKVWNFQKQSHSDILTDEFYAQLKGKGQRATSALFLAKYQIYTAENKGSREDKKLQAYQWRVDALSKELTREELAFVITEINNNLNNSSGYLGAISDRSKELYFNNETVGEYLWKQIAANPHNSLKNQVFYRQDYLDEFEQIWKTQSAFYPEILTDELKKELRDVVIFYQRKLKSQKSLVSFCEFENKEIEIKNEDGTTTKKVIGLKVAPKSSPLFQEFKIWQNLNNVLIRKKGSKTKKVAKNQQAVLFEEEKTISELDLEAKQALFNELNLKGNLKADYCLEILGYSPKEWEMNYSILEGNRTNKALYEAYLKITDLEGYDAKNHLKVKLNKDEVELDDLKVPASEIKDMVQAIFKEAGINTDILHFNAELDGKDFENQASYQLWHLLYSYEGDDSKSGNELLYKLLETKFGFKKEYAQILANVSLSDDYGNLSTKAMREIITHLKQGFPFTGRKDRPDEPSACEFAGYKHSKHSLTKEENEKRVLKDSLEVLKKNSLRQPVVEKILNQMINLVNALLKKYRTENPNFKFDEIRIELARELKKKAEERANMTANINKAKTEHEKIIKILKNEFGLPNPTRNDIIRYRLYEELKDNGYKDLYKGDYIPREKLFSKEIDIEHIIPKARVFDDSFSNKTITYRKTNLEKGERTAYDYIESLGEKQLEEFLSRIENLYEIGKPSRLHNRRNPLKKVEEKGISDSKYKKLLKKESEIGDGFVERDLRETQYIAKKAKEILLQITRSVLSTSGGITDRLREDWDLINVMKELNLPKYRALGLTKMEDRKYGQQVEVITDWTKRNDLRHHAMDALTVAFTKHNHIQYLNYLNARKNEKHKEHNNIMAIQQLETIKVTDENGNEKRIFKAPMPNFRQVAKAFLENVLISHKAKNKVVTKNKNKISGNNKVQEVLTPRGQLHKETIYGKYQYYVQKEEKIGGKFDLETIEKVANPLYQSLLKKRLEENGGDPKKAFTGKNSLAKNPIYLDEAQTEQLPEKVKLVWLENSFSIRKDITPENFKDEKLIDKILDEGVKRILKERLQSFGNDAKKAFSDLEKNPIWLNKEKGIAIKRVTISGVANAEPLHTKKDHLGKEILDKEGKPIPVDFISTGSNHHVAVYRDEKGNLQEKVVSVFEAVVRANQGLPIIDKTYNQYLGWEFLFSMKQNEMFVFPNESTGFNPNDIDLLDPKNKKIISPNLFRVQKLATGDYWFRHHLETTVETKSATKDMTYKRLSLNHIKNIIKVRINHLGDIVSVGEY

SEQ ID NO: 671 - protein, 1029 aa, unidentified
  source 1..1029: note = Alicycliphilus
MRSLRYRLALDLGSTSLGWALFRLDACNRPTAVIKAGVRIFSDGRNPKDGSSLAVTRRAARAMRRRRDRLLKRKTRMQAKLVEHGFFPADAGKRKALEQLNPYALRAKGLQEALLPGEFARALFHINQRRGFKSNRKTDKKDNDSGVLKKAIGQLRQQMAEQGSRTVGEYLWTRLQQGQGVRARYREKPYTTEEGKKRIDKSYDLYIDRAMIEQEFDALWAAQAAFNPTLFHEAARADLKDTLLHQRPLRPVKPGRCTLLPEEERAPLALPSTQRFRIHQEVNHLRLLDENLREVALTLAQRDAVVTALETKAKLSFEQIRKLLKLSGSVQFNLEDAKRTELKGNATSAALARKELFGAAWSGFDEALQDEIVWQLVTEEGEGALIAWLQTHTGVDEARAQAIVDVSLPEGYGNLSRKALARIVPALRAAVITYDKAVQAAGFDHHSQLGFEYDASEVEDLVHPETGEIRSVFKQLPYYGKALQRHVAFGSGKPEDPDEKRYGKIANPTVHIGLNQVRMVVNALIRRYGRPTEVVIELARDLKQSREQKVEAQRRQADNQRRNARIRRSIAEVLGIGEERVRGSDIQKWICWEELSFDAADRRCPYSGVQISAAMLLSDEVEVEHILPFSKTLDDSLNNRTVAMRQANRIKRNRTPWDARAEFEAQGWSYEDILQRAERMPLRKRYRFAPDGYERWLGDDKDFLARALNDTRYLSRVAAEYLRLVCPGTRVIPGQLTALLRGKFGLNDVLGLDGEKNRNDHRHHAVDACVIGVTDQGLMQRFATASAQARGDGLTRLVDGMPMPWPTYRDHVERAVRHIWVSHRPDHGFEGAMMEETSYGIRKDGSIKQRRKADGSAGREISNLIRIHEATQPLRHGVSADGQPLAYKGYVGGSNYCIEITVNDKGKWEGEVISTFRAYGVVRAGGMGRLRNPHEGQNGRKLIMRLVIGDSVRLEVDGAERTMRIVKISGSNGQIFMAPIHEANVDARNTDKQDAFTYTSKYAGSLQKAKTRRVTISPIGEVRDPGFKG

SEQ ID NO: 672 - protein, 1450 aa, Elizabethkingia anophelis
MKTIMVKNILGLDLGTNSVGWALIKQDFENKQGDILGMGSRIIPMSQDVLGDFGKGNSISQTAERTKYRSVRRLRERFLLRRERLHRVLNVLDFLPEHYASQIDFNKRFGKFKEETEPKLAYSNDGFIFKKSFEEMISDFKTHQPELLENNKKVPYDWTIYYLRNKALSHKIEKEELAWILLNFNQKRGYYQLRGEEEEENPNKLIEFYSLKIVDVLADEPQKGKSDIWYSLILENGWIYRRSSKIPLLDWKGKTRDFIVTTDLNDDGSVKTDKEGNEKRSFRAPGENDWTLVKKKTEQEIDNSDKTVGAYIYEALLQNPKQKIKGKLVRTIERKFYKAELKQILEKQMEFHPELRQDDLYSDCVRELYKNNEAHQLTLSKKDFVHLFMEDIIFYQRPLRSQKSSISNCTLEFRKYKDENGTEHIQYLKALPKSNPYYQEFRIWQWMYNLNIYKKEDDTNVTKEFLNSKADFESLFEFLNNKKEVDQKALLKHFKINDKTHRWKYVEDKKYPCNETKTMISERLKKVENISDDFLTREMEQKIWHIIYSVNDKVKYEKALKSFAEKNNLDESSFFEAFKKFPPFKSEYGAFSEKAIKKLLPLMRLGKYWDDDEILKYSDIYFKNIEYLLGVLKQKDKNISDDNRQNWNKSINNKLREELEIFQNAEIESFQGLRLHIAQYILYGRHSEAAMLGKWNSADDLEEFLKEFKQHSLRNPIVEQVITETLRVVKDIWVKYGNGAKDFFNEIHIELGREMKLPAEDRKKITNQISENENTNLRIKALLAEMMVDSSVENVRPFSPMQQEILKIYEDGVLNSDIEIEDDILKISKTAQPSPSDLKRYKLWLEQKYKSPYTGQIIPLNKLFTPEYEIEHIIPQSRYFDDSFSNKVICEAAVNKLKDNFIGLGFIKQFGGTIVECGNGKSVTVLKEDQYEDFVKKHYANNRSKRNKLLLEDIPEKMIERQMNDTRYISKYISGVLSNIVRTEDGTDDGVNSKNIVPGNGKITNTLKQDWGLNDIWNDLILPRFERMNQLTNSTDFTAWNENHQKFLPTVPVEFSKGFSKKRIDHRHHALDALVIACATKDHVNLLNNQSAKSDTKRHDLKRKLMKFEKVAYNHPQTGERIEREVPKQFLKPWETFTVEAKNGLETIIVSFKQNLRVINKATNHYEKYVEKDGAKVKGRVEQAGTNWAIRKPMHKETVSGKIDLPRIKVPKGKILTATRKNLDTSFDLKTIGSITDTGIQKILKNYLQYKDNNPELAFSPEGIEDMNKNIEKFNDGKVHQPIIKVRIFELGSKFPLGQSGNKKDKYVEAAKGTNLFFAVYEDKNGKRSYETIPLNEVIERQKQGLTVVDLKGVNDFYLSPNDLVYVPSEDELENVSMIDYNKLSNEKVYKVVSFTGNQIFFVRQDVATSIVNKAEFSSLNKMERAIGGTMIKEVFVKIKIDRLGNISKV

SEQ ID NO: 673 - protein, 981 aa, Sphingomonas sp.
MRCQLPVSAASATLQKRGGRMRRLGLDIGTNSIGWCLTEDDSRIVDIGARIFSDGRDPQSGTSLAVDRREARAARRRRDRYLGRRSSFLEALVAHGLMPDDADEAQMVAQRDPYPLRARALDEKLAPIEIGRVLFHLNQRRGFKSNRKAERKSGDNEEGKIASAARGLDEAMAEAGTDTLGQFLAGLETKRVRMNGENQTYDFYPQRRHIEYEFGRIWEEQAKHHPTLLTDAARAELHRILFFQRPLKEQAIGICTFVHNEFRLARAHPLFQERRLYEEVNQLEITTPGAPNRKLKMDERDRLILKLRGVRAANFESLGRLLKLEPGQSFNKASETRTQLAGNEVHATLSDKKRFGNSWEHFDRARQWKIIERLMEEENPDTLHEFLTGECGLDDERADTTAKASLPEGYGRLGINATSRILDELKKEVITYAEAVGRAGWHHTDNRTGEILSQLPYYGELLTRHIPPGTQDPNDPPEKRWGKITNPTVHIGLRQLEKLMNAIITLHGRPNEIVVELARELKLNEKDKEEHNRRIRRDTAAAQARSKKLETEGFVDNGANRALLRIWEELNPANPLDRRCPYCGEPIGMRMLFSGEADIDHILPYSRTLDDSIGNKSEGNVYVIPGRMTAMLRRLWGLNSLLPDHNIVENKHSDAPKNRLDHRHHAIDAAVVAVTTRGLMQRIARTAGLAEDRNLDRLFEGLDQPWAGFREELGERLSAVVVSHKPDHGRKGRPLPGKDMTAGRLHNDTAYGLTGEVNAKGVPVVVHRVPLMSLKSTDLTDPDRIADKALRDALYRATEGSTGKDYEAALVRFAKQDRVFGGIRRIRVREPLNVITIKDQSGRVYKAYKGDANARFDVWQLPGGKWVSDVVPMFDAHQVGQADRRPHPAARKILSLHQNDMLAIERNGGPREIVRVVKFSTNGSLHLAPSTEAGPLKARDATPSDVDPFKYINSSAGGLKRVQARQVRVDPLGRIFDPGPR

SEQ ID NO: 674 - protein, 1342 aa, Lactobacillus salivarius
MEDMERYHIGLDIGTSSIGWAVIGDDFKIKKKKGKNLIGTRLFNEGATAAERRGFRTQRRRLNRRKWRLKLLEEIFDPYMAEVDEYFFARLKSSNLSPKDSNKKYLGSLLFPDKSDSNFYDKYPTIYHLRRDLMEKDEKFDLREIYLAIHHIVKYRGNFLEKVPAKNYKNSGASIGFLLEEVNSLYKDIIGDESIAILNSEKFEDVEKIILDEETRNLDKQKSVGKLLVEDKKKKNIVTAFSKAIFGYKFNIEDLLLIENDEKNKLTFNDENIDDIFNELSHSLDDKQMDLLTKTREIYFKFKLNMIVPTGYTLSESMIEKYEMHKAHLKMYKEFINTLNTKDRKILKNAYSDYINTEKAKAANAQENFYKTVKKIIKDNNSDTAKKIIVLIDEGNFMPKQRTGENGVIPHQLHQIELDRIIENQAKYYPWLAEANPVEKNRKFAKYKLDELVTFRVPYYVGPLIDKTESNKNEKETKFAWMVRKAKGTITPWNFENLVDRTESANRFIKRMTSKDTYIIGEDVLPASSLLYEKFKVLNELNNIKVNEKKLDIEQKQDIYLNLFTTAKNVTKKSLATYLNCSADSISGLSDGEKFNSSLSSYIDLKAILGNIVDDCNKNEDLEKIIEYSTVFEDGNIYKEKLSEISWLTDEQIEKLSNIHFKGWGRLSKKLLTQITNENGERIIDALWNTSNNFMQIINDESIQAKLAEINGKYAGKSDLEDILSEAYTSPQNKKAIRQVMKVVEDIEKAMQCEPTSISIEFTRKKQKSRLTNTRYKKISDVYEKIADEVISEYELRKLQSELDSNANNMRDRYYLYFMQLGRDMYTGEKINIDELHQRYDIDHILPQSFIKDDSINNRVLTRKDVNNKEKSDKTAADLYAVEMSDFWRKLRKQGLITEQKYKNLLTKSDSIDKYAKKGFIKRQLVETSQVVKLVANILQDKYSDTKIIEVRAKLNSNLREEYKLIKNRAVNDYHHAIDGYLTTFIGQYLYKTYPKLRSYFVYNDFKKLDSNYLKHMKKFNFLWQLQDDKTIDIYDNVNNKFVLNVPEMKKYIQKIYNYKYMLVSKEVTTKNGAFYDQTKYNAKTVNLIPIKKNKPTNIYGGYKGKVSSYMMLVKIRKKKEVIYKFVGVPRLWTDELDRLKDTTERKILLNEIAKNSLSKTEQDFEVILDKVYYGQLIIDGNQKYTLGSSEYKYNAMQLHLSKHALEVLAKENVKDAEITDKDLVSVYEEILSVVNKYFELYDINKFRQKLNEGLEIFRKLPVYNVYESNKIKQVGKFEVLNRILMGLHANAMITDLKVLGIKTKLGQMQVNGGIKLSPDAKLIYQSPTGIFSRAVRVKDLG

SEQ ID NO: 675 - protein, 1443 aa, Porphyromonas gingivalis
MKKILGLDLGTASIGSAYVLEAEKSADQTKIVYLGTRIILSSADAENFSKGLSCSPTTDRTFKRSMRRRLQRYKQRRSSLIQQFKKIGIITNTEQIIREPISETHELLRIRSKAVSEHVSLEEFARILLTINKRRGYKSNRKTSKSTEEDGKLVDAMAVTKELIKLKKTPGQYMFERFKRGKYAEIDFYPFDLINELKQIWEVQGQKYPDVLTEGLLSSLLKQKTGKAKELIYSKSDLNPAEVPIDYQKGKKLRKTILNKYFAYESRSLAVTNIIPVEQAITAIVAICKQINNSSGYLGAIGDRSRVLYANNQTIGQYLYERIKANPHDRIRGEVFYRQDYLDEFDRIWECQQNYYPAILTNDRKQYIRNRIIFYQRPLKSKKSELAFCEFESREVEHNGKKYTEGLHVAPKSSPVFQHFRLWQRLGQIEVSPLRKWDKQSNELFEQQNNADREGILNTEAKQKLFSYLNLLDHLTDNEILNILGYSPDKWKINFREIIGNRTNNLMMKAFFSMKEMTDGEQIDWEKNLTKITNGQSLISPEQIVDLIRQFFEREGITTSLLYFDPATDNFREQSHYSLWHLLYSYEDDNSPTGTTSLCKTLAKRYGIPHELCPLLASLTFERQYGSLSTKAMRKLLPFMQEKRYDEACELAGYRHSAWITKEENAKRTLKNKLPLLRKGSLRNPVVEKILNQMTHVINTHIAEYGNPDEIRIEMARDMQANSKQRKAMTAAITEATKRNTQFIEEIQKEFGFNPSKNDLIKYKLWKELAPLGNKTLYSNIYIPKEELFTAKFEIEHIIPRALFYDDSFSNKTLELNSVNKLKGNKTALDYLDTLGQEKANDYILRVEELKKIGAITQAKYKKLLIREKDLGDDFTNRDLTNTRYIIRHAADRDLTNTRYIIRHAADMLLQVTPSIVHTNGSITAILRRDWGLLDILKELNLPTYESIDRKISDPEEKLTQSVDRKDGQAIKMIKDWSKRDDHRHHAMDALITALTTRKHVQYLNGNSGAEETDKAQKLEQLKALRKQLIGSDGHFIPPMHDIRVQAKEALSRVIISTKVKGKVTTPNTNIICSRDKTTGRKIYVRQTTLTPRGALHLDTKYGINRYYQEREVSIGSKLTQEEIRLVSSPHIQSILLERLRAFDNNPKSAFTGRNSVDKKPLEDKNKKLVYTDKKVKQTILANRFVKRDRVNSKLDLDNVIDTGIKRILERRLKQYGGKYETAFSDLENNPIWLNEEKGIAIKSVRIRGKNNTITIRQTNTCRIKYVANDNNHHLAVYALPDGSIKDDIVSFFDAVERSRKRLPIIDKHKNQSLGWKYLFSIKQNEYFLLPQQVEKIDIDTGEISMQTTFSPKDLSHEYIMNPDNYAELASHIFRVQSISKTPQGNRDVRIYLFKQQYISGSQKDSLHLKGITHRQISSAKDLAELVKIRVNHLGRIVSVGEK

SEQ ID NO: 676 - protein, 1095 aa, Actinomyces sp.
MPAHHLRVGIDVGTHSVGLATLRVDDQGTPIELLSALSHIHDSGIGKEGQKDHDTRKKLSGVARRTRHLLRNRRERLQQLDKVLVDLGFPIPKPEEYPDLSERTDPYRVWRVRARLVEETLPEELRGPAISMAVRHIARHRGWRNPYSKVESLLSPAEESSFMKALRKRIMTKTGEVLDDDITPGQAMAQVALTHKIYMRGPEGILGKLHQSDNANEIRKICARQGISSDVCKQLLRAVFKAESPRGSAVSRVAPDPLPGQGSFRRAPKCDPEFQRFRIISIVANLRISETKGENRPLTVDERRQVVAFLMEDSQADLTWVDVAEKLRVSRQALRGTAMLTADGERSAAQPPIDVTDQIMRKTKISALKTWWDKADAERRGAMVRYLYEGLEDSECAEVIAKLPEKDHAKLDSLHLPAGRAAYSRESLTALSDHMLETTNDLHEARKRLFGVDDSWAPPAEPVGAPVGNPSVDRTLKIVARYLSAVESIWGTPEVIHVEHVRDGFTSERTAEERDKANRSRHNDNQKAIEKIQHDYGKEGYISRGDIVRFHALKLQGSACLYCGTTIGYHTCQLDHIVPQAGPGSNNRRGNLVAVCERCNHSKSNTPFAVWAQKCGIPHVGVKEAISRVNGWVEHNHSTSSGDLTRLKKEVIARLRRTQKDPEIDERSMESVAWMANELHHRIAAAYPETTVMVYRGSITAAARKAASIESRINLIGEKGRKDRLDRRHHAVDASVVALMEPSVAKTLAERSSLRGEQRLTGQEQTWKQYTGLTVGARERFEAWRGHMHRLTELFNESLAADEVYVTQNIRLRLSDGSAHTVKASKLVSHRLGDGLTVQQIDRACTPALWCALTREIDFDEKNGLPAREDRVIRVHGQEISSADCIQVFSKRKKTKSDRDEAPFGAIAVRGGFVEIGSSIHHARIYRIEGEKPAYAMLRVFTHDLLSQRHGDLFSAVIPPQSISMRCAATELRQAISEGRATYLGWIVSGDELHIPVETFTTHKIGSFLKDYPNTTRWRICGYDSETMLILKPRILSAEGLNNSSDIAEYVIKNKGWRVAINKLAKVHPTVVRRDALGRPRHSSRSNLPVTWSIE

SEQ ID NO: 677 - protein, 1095 aa, unidentified
  source 1..1095: note = Sphingomonas
MDGGAMDWRLGLDLGANSLGWAALRLDRAGDPIGILAMGSRIFSDGRDPKSGASLAVDRRAARAMRRRRDRFKQRQAALLKYLIRDGLFPADQADRQRLADEDPYALRARALDEELSLFEIGRALFHLNQRRGFQSNRKADRGQDDEAGKIAVGVDRLNQQMEEQGARTLGEFLHQRRRAATDANHIPSVRTRLRPETGEGAKGDGYDFYPSRALIAEEFEEIWAAQAPHYPDTLTQQVHDRLYEIIFHQRPLRAPQVGQCTLVAGETRLPKAHPLFQKRRLLEEINALMIVRPGEIAQRLTPEERDTLYLKLKDKRTVSFATLRKTLKLDSAARFNKESENRTELKGDEVAAELGAKTRLGTRWQHLSGDQQWEVVHRLMALESQADEAAFRDWISQTYDLLPEQAAAVLGARLPQGHGRFGPTATTTLIDSLLHDRTEDGRVVVYSEAVQRSGLGHHSDLRHDRDDEDVTELPYYGVALERHIMPGTAEPTDPEEMRIGRLTNPTVHIGLNQLRHVVNRLIRAYGPPKEIAIELARELKLSEDEKKKRNSENRDNRLAAEGRSKKLEEIRQRDTGANRALLKLWEELNPGNVLDRRCIYTGEQISIDMLFSDRVEVDHILPFAQTLDDSNGNKLLCLREANREKRRRSPYEAWGHTDRWPDIAERASRLPKPKRWRFEPDAMQRFATEDGFLARHLVDTQYLGRLAREYLSWLYPGRGEGSGHVWVSPGRLTEMVRRKLGLNDLLPDHNFGGGADQPKNRLDHRHHAIDALVVAIVDRGMLQAIARASGQDGSEGRERIHIPAPWDGFRDDLRVAVNGIIVSHRPDHGTVAKAGLARGRDQTAGRLHNDTAYGLTGETDAKGNSIVVRRIPLSAIKKPADIARVRDPLLRNALAEFTKGLDGKAFEARIGRFHELGPLLYRGIRRVRVVETLTVIPIRDAEGRAYKGYKGDSNYRYDVWEMPDGKWRCQVVSMFDAHQSTEQARPHPAARKILSLQRNDILAIERTEGDRELVRVVKFSEKQFAVAPPHEGGSLKTRDGNADDPFRYLYPSPNTLKGWRARQVRIDELGRVLDPGFPARKSVRRTRPRAAPVD

SEQ ID NO: 678 - protein, 1345 aa, Streptococcus constellatus
MGKPYSIGLDIGTNSVGWAVVTDDYKVPAKKMKVLGNTDKQSIKKNLLGALLFDSGETAEATRLKRTARRRYTRRKNRLRYLQEIFTGEMNKVDENFFQRLDDSFLVDEDKRGEHHPIFGNIAAEVKYHDDFPTIYHLRRHLADTSKKADLRLVYLALAHMIKFRGHFLYEGDLKAENTDVQALFKDFVEEYDKTIEESHLSEITVDALSILTEKVSKSSRLENLIAHYPTEKKNTLFGNLIALSLDLHPNFKTNFQLSEDAKLQFSKDTYEEDLEGFLGEVGDEYADLFASAKNLYDAILLSGILTVDDNSTKAPLSASMVKRYEEHQKDLKKLKDFIKVNAPDQYNAIFKDKNKKGYASYIESGVKQDEFYKYLKGILLKINGSGDFLDKIDREDFLRKQRTFDNGSIPHQIHLQEMHAILRRQGEHYPFLKENQDKIEKILTFRIPYYVGPLARKGSRFAWAEYKADEKITPWNFDDILDKEKSAEKFITRMTLNDLYLPEEKVLPKHSPLYEAFTVYNELTKVKYVNEQGEAKFFDTNMKQEIFDHVFKENRKVTKDKLLNYLNKEFEEFRIVNLTGLDKENKAFNSSLGTYHDLRKILDKSFLDDKANEKTIEDIIQTLTLFEDREMIRQRLQKYSDIFTKAQLKKLERRHYTGWGRLSYKLINGIRNKENKKTILDYLIDDGYANRNFMQLINDDALSFKEEIARAQIIDDVDDIANVVHDLPGSPAIKKGILQSVKIVDELVKVMGHNPANIIIEMARENQTTDKGRRNSQQRLKLLQDSLKNLDNPVNIKNVENQQLQNDRLFLYYIQNGKDMYTGETLDINNLSQYDIDHIIPQAFIKDNSLDNRVLTRSDKNRGKSDDVPSIEVVHEMKSFWSKLLSVKLITQRKFDNLTKAERGGLTEEDKAGFIKRQLVETRQITKHVAQILDERFNTEFDGNKRRIRNVKIITLKSNLVSNFRKEFELYKVREINDYHHAHDAYLNAVVGNALLLKYPQLEPEFVYGEYPKYNSYRSRKSATEKFLFYSNILRFFKKEDIQTNEDGEIAWNKEKHIKILRKVLSYPQVNIVKKTEEQTGGFSKESILPKGESDKLIPRKTKNSYWDPKKYGGFDSPVVAYSILVFADVEKGKSKKLRKVQDMVGITIMEKKRFEKNPVDFLEQRGYRNVRLEKIIKLPKYSLFELENKRRRLLASAKELQKGNELVIPQRFTTLLYHSYRIEKDYEPEHREYVEKHKDEFKELLEYISVFSRKYVLADNNLTKIEMLFSKNKDAEVSSLAKSFISLLTFTAFGAPAAFNFFGENIDRKRYTSVTECLNATLIHQSITGLYETRIDLSKLGED

SEQ ID NO: 679 - protein, 861 aa, Acholeplasma palmae
MKKILGLDVGVTSVGWAIIDEEGNIVKTGVRLFEEASAKNNLDRRTFRGQRRLIRRRNQRIDDMRSLLIKNLLIDNQFKVLDNPYQLREKGLKEKLNHEELATVLLHYAKRRGSSLEVVEEEGIKKETSTKSILNENAKELKEKQYVVNVQLNRLKKEGKLRGNINNFKTKDYAKEIITLLDNQNLDSELKKEIIEIIQRRRHFSEGPGNFNSPTPYGRYREVTGTLKEKIIKDIHANYRKQYLNSNFSIVFDDIEYQVFKNGRIVNKEKYDLIDLMRGKCSLYPDQPRSPKMAFSAEIFNLLNDLNNLKILNRENNKITKEEKITIINHVREKGSITVQQLLKILNAQQEEIKGFRIDKNEKPIITEFKGYKKILKVYKELDITIDSDEILDRIIEILTQTLVEEERILSLKKEKINERLIEPLSLLTGIKEYHSLSLKAIYQLNKEMLEESLNQQEIITNWGIKNDDTIKELVLDESLILSPVAKRAHREALKLVNQLIKEEGNFSKIVIETTRSKNSLDEIKEIKELQKNNENNRRQAEEIIGDRAKELVNSSNILKLRLYNEQNGKCAYTGEALSIDALLNDPNIYEIDHIIPISISFDDSYANKVLVTRSANQKKGNKTPFGYFSKADLVANSKINSWNMFKEIVLLNKNYSIRKKQNLLFEEDITKHSVVSDFINRNLVDTSYAIRSLMTTLKNYFKSNHVDTTIMTIKGKQTNYFRKTGMIAWSRKHPKRENPFRKDRNKYIHHAIDALIIAGLSNRKYITKLYNLSQEIDIETGELIEYIDASEDSKLIQYLLKVGEVQEEDVKFSWKIDSKPNRSMMNQTIYSSRILGGESLLLSKIDIYNSKKEDFIKKNY

SEQ ID NO: 680 - protein, 1074 aa, Bacillus pseudalcaliphilus
MGYLDYRIGLDIGTNSIGWSIIELTTVQSKLDGKYRLKAVGLIDAGVRMFDRAEVPKTGASLALPRRLARSSRRRLTRRSARKKAIRNLLVKEDILNQIELDHLYRTSELVDIWQIRVEGLERRLGRQEWARLLIHLGQKRGYRSTRKAEEGADTEGRAVLSSIKENQETLKQYRTVGEMWATDDKFKGRVRNSTNEFIFNVSRDNLEEEIRFLFQQQRELGSMYASKLLEESYMEVWGHQLPFASGESILKNVGTCSLYEKEKRAAKATYTFQYFMALDKLNNVRILPSMRTLSEEERGLALKAMFERDKLPKNPPKFTYSHLRKAIKLEEDETFQTISYDVEKTLATNESAVFVNLAAYYQIKKVCDEHNENYDYVDYNTIGHALTVYKTDEDINKYLASKNNIAKRVYANDFIDSVLKHSYTTFGHLSLKALSRIIPLMEEGEVFAKAKEKAGFKEESYLEIKSKLLTNIPDAIKNPVVMRSLTQARKVINAIIKRMGEQPASIQIELARELSKDVSERKKITNGFAENRSRNQFAIKTLEENHITNIRGQDIVKFKLWQEQGGRCAYSLKPIKLEELISFLKKERRYEHNLDVDHIIPYSKTFDDSYTNKVLVFSDENRKKGDQIPAEYLGIGTKRWEKYKEFVITSKFPASKKKRLLKEQLVEREELFMKERHLNDTRYASRYFMNFLRENLLRKETVLHETQWVTAVAGRVTSHIRKRLGFGKDREETHLHHALDAIIVACTDKWMIDCVTNYYKSREGGSIKRKEIRFPSPWNGFWHDVQTKLAQLPQPEVINESISKGNPDAVDYMLVSRMPRKSITGAAHKETISKWGGYDDKGKALLVKKVALSELKFKNDDFPMYNKETDPLLYEAIKNRYVESGRDVKRAFATPLYKPSKSGKRNEVKRVKVIAEKKAMVREVNGGIAENGGLVRSDIFLKEKKYVMVPVYTFDTIKQQLPNKYVVSGRGYEQWPELTAEHVFQFSVYPYELVHVGTNKGDNSFYYFASLNISSNVLKFSECNRPTKDYIEIGLNSIILLEKYEIDVLGRITGQSKKGIRQSFKNNKSQMKE

SEQ ID NO: 681 - protein, 1122 aa, Streptococcus suis
MSNGKILGLDIGIASVGVGVIDAQTGEIIHASSRIFPSANAANNAERRTFRGSRRLIRRKKHRIKRLDDLFNDFHINLDGEMSTDNPYVLRVKGLSQKLTVEELYISIKNIMKRRGISYLDDAESDNEAGRSDYAKAIERNRQLLTSKTPGEIQLERLEKYGQLRGNFTIIDEEGQSQQIINVFSTSDYVKEVEKILDCQKMYHKFISDEFCDKLIELLREKRKYYVGPGNEKSRTDYGIYRTDGTTLENLFGILIGKCTFYPDQYRSSRASYTAQEFNFLNDLNNLTVPTETKKLSQEQKEFLVNYAKETSVLGAGKILQQIAKLADCKVEDIRGYRLDNKDKPELHTFETYRAMKGLVPLVDIGVLSREQLDILADILTLNTDFEGIREALKKQLPNVFDEKQVKGLASFRKSKSQLFAKGWHNLSQKIMLEVIPELYATSDEQMTILTRLGKFEKSSVAEYPSSINVDEITDEIYNPVVAKSIRQTIKIINASIKKWGEFDQIVIEMPRDRNEDEEKKRIADGQKANAKEKADSILRAAELYCAGKVLPDYVYNGHNQLATKIRLWYQQGERCIYTGQPISIHDLIHNQNQYEIDHILPLSLTFDDSLSNKVLVLATANQEKAQRTPYNYLKSATSAWSYREFKDYVTKRKGIGKKKCEYLTFEEDINGFEVRSKFIQRNLVDTRYASKVILNALQDYFKISGIQTKVSVVRGQFTSQLRHKWGIEKTRETYHHHAVDALIIAASSQLRLWKKQESPLVVDYQEGRQVDLETGEILELTDEQYKELVYQPPYQGFVNTISSSAFDNEILFSYQVDSKVNRKISDATIYATRNAQLGKDKTEGIYVLGKIKDIYTQAGYEAFLKRYTKDKTSFLMYHKDLDTWEKVIEIILRDYREYDEKGKEIGNPFERYRRENGYVKKYSRKGNGTAIKSLKYYDNKLGNHIDITPENSRNAVVLQSLKPWRTDVYFNKETGKYEFLGIKYSDLSFEKGTGEYGISQEKYDSIKIAEGVAKKSIFKFTLYKQDLLFIKDIENNFGKLLRFTSKNDTSKHYVELKPYDKNKFGTEEPLLPVLGNVAKSGQCIKGLNKSNISIYKVRTDILGYRHFIKQEGEHPQLKFKK

SEQ ID NO: 682 - protein, 1367 aa, Fusobacterium periodonticum
MKKQQFSDYYLGFDIGTNSVGWCVTDFNYNVLRFNKKDMWGSRLFDEAKTAAERRVQRNSRRRLKRRKWRLNLLEEIFSDEILKIDSNFFRRLKESSLWLEDKSSKEKFTLFNDDNYKDYDFYKQYPTIFHLRNELIKNPEKKDIRLVYLALHSIFKSRGHFLFEGQNLKDIKNFETLYNNLMAFLEDNDIYKNIDSSYIGNLENIICDSKKGLKDKEKEFKEIFNSDKQLVGFFKLSVGSSVSLNDLFDTDEYKKGEVEKEKISFREQIYEDDKPIYYSILGEKIEFLDIAKSFYDFMVLNNILADSQYISEAKVKLYDEHKRDLKNLKYIIRKYNKENYDKLFKDKNESNYSAYIGLNKEKGKKEVIEKSRLKIDDFAKIIKGYLPKAEKIDEKDRSIFNEILDKIELKTILPKQRISDNGTLPYQIHEAELEKILENQAKYYDFLNHEENGISTKDKLLMTFKFRIPYYVGPLNSYHKNKGGNSWIVRKEEGKILPWNFEQKVDIEKSAEEFIKRMTNKCTYLNGEDVIPKDSFLYSEYIILNELNKVQVNDEFLNKEIKKKIIEDLFKKSKKISEKNFREYLLVNQITNKTVELKGVKDAFNSNYVSYIKFKDIFGDKLNLDIYKEISEKSILWKCLYGDDKKIFEKKIKSVYGDILTKDEIKKINSFKFNTWGRLSEKLLTEIEFIDLETGECYSSVMDALRRTNYNLMELLSSKFTLQENIDNENKEVSEFSYRDLVEESYVSPSLKRAILQTLKIYEEIRKITGRIPKKVFIEMARGGDETMKNKKIPARQEQLKKLYDSCGKDISNFSIDIKEMKNSLNSYDNNSLRQKKLYLYYLQFGKCMYTGKEIDLNRLLQNNDTYDIDHIYPRSKVIKDDSFDNLVLVLKNENAEKSNEYPLKKEIQEKMKSFWKFLKEKNFISDEKYKRLTGKDEFELRGFMARQLVNVRQTTKEAGKILQQIEPEIKIVYSKAEIASSFREMFDFIKVRELNDTHHAKDAYLNIVAGNVYNTKFTEKPYRYLQEIKENYDVKKIYNYDIKNAWDKEKSLEIVKKNMEKNTVNITRFIKEEKGQLFDLNPIRKGETSNEIIAIKPKFYEGSTEKLNEKYGYYKSLNPAYFIYVEHKEKNKIIRSFERVNLVDVNKIKDEKSLIKYLIENKGLIEPKVIKKVYKRQVILINNFPYSIVALDSNKLMDFENLKPLFLERKYEKILKNAIKFLEDNQGKTEEYYKFLYLKKKDRNEKNETIDSVKERYNIEFNEMYDKFLEKLDSKDYKNYINNKKYSELVNVKEKFIKLNLFDKAFTLKSFLDLFNRKTMADFSKVGLTKYLGKIQKISSNVLSKNELHLLEESVTGLFVKKIKL

SEQ ID NO: 683 - protein, 1055 aa, Saccharibacter sp.
MTPISESLLFGLDVGISSCGWAVLKHSDTTGHIEALGSWCFNAPETKTERTPTNQIRRSSRLLRRVVRRRRNRMTEIRRLFARHGLIDNDRPDALRQPAIDPWEMRGQGLDRQLTPEEFAVALAHIAKHRGFKSSAKRVKSNASPDDSKMLAALEKTKELSAQYRTIGEMFARDSAYVQRRRNRDGLFDRTISRDDLIDEAKILFDRQRKLGNPVASTEIEEAFTRIAFWQNPMQDSGVLVASCPFEPKEKRSSRFSPSFERFRLLCRLINLRVTDGPEERPLTEEELRLAYEHAGKTRKLTAAAIRKLIGLRDDQHFTTIPPEQEKQDITSRTGETFAGTATFRSVLGESLWRQLLPHPEWLDNAAWIISFHELTETIIKKLGEIGLPVEAYELICDALKSDKSPFAKFKGASSLSDKAVRALIPYLQQGLTYDKACQKAGYDHAASRFSGRATIDTKAKFNALMAEVRDSIANPIARKALSEGMKQLWAMRNRWGLPGAICIELARDVGNSLEKRKEIERNLKTTAKQRAREREEACELLNLKEVSSDILLRYRLWKEQGGRCCYSGKSITPDMLMAQDNRIQIDHILPWSRFGDDSYSNKGLCLAKENQAKKNQTPYEWIHGQGTTAQKEQWDKFVADVESRKNTKGLKKRNFLLKGSKEIEERFRSRNLNDTRYAARLMVEAARLLYPAGQRGEKGGTRRVFTRPGALTAALRHAWGVESLKKIDGERLHDNRHHALDAAIVAAVSEAEIQKLTKSFQECEQKGLSRPMRDVAPPWDGFRDQLKEKYETIFVARPERQRARGQGHEATIRQVREEETGPVIYERKAVSALTLADLAKIKDPDRNAGLIASLRQWIEAGKPADKPPRTPCHQSAAGHEIRKVRLATIITPAVPVRGGMAKRGEMTRVDIFKVIGKKGKPEWYMIPIYPHQIMNRSQWPAPPNKAVVAGKSEADWPIMGAEAQFQFSLYPCSYVRLFKEGTVIEGYFCGCHRSRAYITLALSTGAAPLQKGIGIKTQEHIQKFSVNRFGELSPVKQETRTWHGVACTSPDQHD

SEQ ID NO: 684 - protein, 1104 aa, Lactobacillus shenzhenensis
MGYILGLDIGIASCGYAILETDALGIPFKIKMLNSVIFTRAENPKNGASLAEPRRRYRGARRRKRRTSFRKHRTRQLFIREGLLTQQDITAYLNQEISHDDIWQLRVAALDQRITSRQLFQVLYYFVTHRGFKSNRKAELTDKDNGPVLKSISAFETEMTENGYRTIGELYAHDRRFQDRKHNKGYTDGFIGTVKRAWLVDEIKRILAAQQSLGNDKITDKFVHQYLDIFESQRNYDVGPANGPYAGDLIAKMVGPDTFDRSRKRSPRATYTFQYFNFLTKLNSLRVADSIGGTYAPLTDDQRQTVTERLWAKGVKSADLTFKQIRALLSLPDGARFNLVTYSGDAKKALEIEGKTKFVSVKPLRDIQKALDDEQLANDHELLDAIALVLTLYKSDDKRRTKFHEQTTLPDDKIEQLLPLNFAKFGHLSTHTMQAIIPYLEQGMVYSDAATAAGYDFRDNQIDMEYIRENVTNPVVRRAVSVANKLVKAVVRRFGKPDSIHIELARDLSKNFQERKQEEQYQKKNAAANEKIAQQLKELGIPVNGMNITKMRLFNEQNGIDIYDLTPNASMAVTDIFSDDLYEIDHIIPYSISFDDSYSNKVLVSAKANREKRDRIPMEFFGNDPKTRAQFVNRVNTNIHNAKKKRNLLKETLTDEDKSQWKSRNINDTRYLNRILMNYLSQNVEFTDVLSKAKHVIALNGAVTAKIRSRWGITKVRVAGDLHHAVDAVVIACVTDGLIQAVTRYAKYQERKGNKLASLDDLQDDNPDGLDAKRFRKLFNDYPLPWPEFREELHGRVSDAPDKLMAGHPWAHYTPEEIAGLQKPFVVRVPNHRIVGPATLDTVYGQPDPDSNIITQRVRITDLKLKKSKNGDDTIAAGTNAYALAEDGGNKVVYETILRALQAANGDGKKAFPEGRVMVKMPNETIPVERVRVTGKATSTVPVGPKSVAANGSMVRIDVYKTPKKYVFVPVYVKDTVNENLPKKAATQRKSLADWYEIQPQDQFEFSLFANDLIHIVNKKGIKTTEINADGMSTNGIREEIVGYFTGADIATASIAFDGPDRSFSARSVGFATLDKVEKVSTNYFGELAVVHETQPLGFTNKGD

SEQ ID NO: 685 - protein, 1378 aa, Pediococcus damnosus
MTNEKYSIGLDIGTSSIGFAVVNDNNRVIRVKGKNAIGVRLFDEGKAAADRRSFRTTRRRLSRRRWRLKLLREIFDAYITPVDEAFFIRLKESNLSPKDSKKQYSGDILFNDRSDKDFYEKYPTIYHLRNALMTEHRKFDVREIYLAIHHIMKFRGHFLNATPANNFKVGRLNLEEKFEELNDIYQRVFPDESIEFRTDNLEQIKEVLLDNKRSRADRQRTLVSDIYQSSEDKDIEKRNKAVATEILKASLGNKAKLNVITNVEVDKEAAKEWSITFDSESIDDDLAKIEGQMTDDGHEIIEVLRSLYSGITLSAIVPENHTLSQSMVAKYDLHKDHLKLFKKLINGMTDTKKAKNLRAAYDGYIDGVKGKVLPQEDFYKQVQVNLDDSAEANEIQTYIDQDIFMPKQRTKANGSIPHQLQQQELDQIIENQKAYYPWLAELNPNPDKKRQQLAKYKLDELVTFRVPYYVGPMITAKDQKNQSGAEFAWMIRKEPGNITPWNFDQKVDRMATANQFIKRMTTTDTYLLGEDVLPAQSLLYQKFEVLNELNKIRIDHKPISIEQKQQIFNDLFKQFKNVTIKHLQDYLVSQGQYSKRPLIEGLADEKRFNSSLSTYSDLCGIFGAKLVEENDRQEDLEKIIEWSTIFEDKKIYRAKLNDLTWLTDDQKEKLATKRYQGWGRLSRKLLVGLKNSEHRNIMDILWITNENFMQIQAEPDFAKLVTDANKGMLEKTDSQDVINDLYTSPQNKKAIRQILLVVHDIQNAMHGQAPAKIHVEFARGEERNPRRSVQRQRQVEAAYEKVSNELVSAKVRQEFKEAINNKRDFKDRLLLYFMQGGIDIYTGKQLNIDQLSSYQIDHILPQAFVKDDSLTNRVLTNENQVKADSVPIDIFGKKMLSVWGRMKDQGLISKGKYRNLTMNPENISAHTENGFINRQLVETRQVIKLAVNILADEYGDSTQIISVKADLSHQMREDFELLKNRDVNDYHHAFDAYLAAFIGNYLLKRYPKLESYFVYGDFKKFTQKETKMRRFNFIYDLKHCDQVVNKETGEILWTKDEDIKYIRHLFAYKKILVSHEVREKRGALYNQTIYKAKDDKGSGQGSKKLIRIKDDKETKIYGGYSGKSLAYMTIVQITKKNKVSYRVIGIPTLALARLNKLENDSTENNGELYKIIKPQFTHYKVDKKNGEIIETTDDFKIVVSKVRFQQLIDDAGQFFMLASDTYKNNAQQLVISNNALKAINNTNITDCPRDDLERLDNLRLDSAFDEIVKKMDKYFSAYDANNFREKIRNSNLIFYQLPVEDQWENNKITELGKRTVLTRILQGLHANATTTDMSIFKIKTPFGQLRQRSGISLSENAQLIYQSPTGLFERRVQLNKIK

SEQ ID NO: 686 - protein, 1688 aa, Ignavibacterium album
MEFKKVLGLDIGTNSIGCALLSLPKSIQDYGKGGRLEWLTSRVIPLDADYMKAFIDGKNGLPQVITPAGKRRQKRGSRRLKHRYKLRRSRLIRVFKTLNWLPEDFPLDNPKRIKETISTEGKFSFRISDYVPISDESYREFYREFGYPENEIEQVIEEINFRRKTKGKNKNPMIKLLPEDWVVYYLRKKALIKPTTKEELIRIIYLFNQRRGFKSSRKDLTETAILDYDEFAKRLAEKEKYSAENYETKFVSITKVKEVVELKTDGRKGKKRFKVILEDSRIEPYEIERKEKPDWEGKEYTFLVTQKLEKGKFKQNKPDLPKEEDWALCTTALDNRMGSKHPGEFFFDELLKAFKEKRGYKIRQYPVNRWRYKKELEFIWTKQCQLNPELNNLNINKEILRKLATVLYPSQSKFFGPKIKEFENSDVLHIISEDIIYYQRDLKSQKSLISECRYEKRKGIDGEIYGLKCIPKSSPLYQEFRIWQDIHNIKVIRKESEVNGKKKINIDETQLYINENIKEKLFELFNSKDSLSEKDILELISLNIINSGIKISKKEEETTHRINLFANRKELKGNETKSRYRKVFKKLGFDGEYILNHPSKLNRLWHSDYSNDYADKEKTEKSILSSLGWKNRNGKWEKSKNYDVFNLPLEVAKAIANLPPLKKEYGSYSALAIRKMLVVMRDGKYWQHPDQIAKDQENTSLMLFDKNLIQLTNNQRKVLNKYLLTLAEVQKRSTLIKQKLNEIEHNPYKLELVSDQDLEKQVLKSFLEKKNESDYLKGLKTYQAGYLIYGKHSEKDVPIVNSPDELGEYIRKKLPNNSLRNPIVEQVIRETIFIVRDVWKSFGIIDEIHIELGRELKNNSEERKKTSESQEKNFQEKERARKLLKELLNSSNFEHYDENGNKIFSSFTVNPNPDSPLDIEKFRIWKNQSGLTDEELNKKLKDEKIPTEIEVKKYILWLTQKCRSPYTGKIIPLSKLFDSNVYEIEHIIPRSKMKNDSTNNLVICELGVNKAKGDRLAANFISESNGKCKFGEVEYTLLKYGDYLQYCKDTFKYQKAKYKNLLATEPPEDFIERQINDTRYIGRKLAELLTPVVKDSKNIIFTIGSITSELKITWGLNGVWKDILRPRFKRLESIINKKLIFQDEDDPNKYHFDLSINPQLDKEGLKRLDHRHHALDATIIAATTREHVRYLNSLNAADNDEEKREYFLSLCNHKIRDFKLPWENFTSEVKSKLLSCVVSYKESKPILSDPFNKYLKWEYKNGKWQKVFAIQIKNDRWKAVRRSMFKEPIGTVWIKKIKEVSLKEAIKIQAIWEEVKNDPVRKKKEKYIYDDYAQKVIAKIVQELGLSSSMRKQDDEKLNKFINEAKVSAGVNKNLNTTNKTIYNLEGRFYEKIKVAEYVLYKAKRMPLNKKEYIEKLSLQKMFNDLPNFILEKSILDNYPEILKELESDNKYIIEPHKKNNPVNRLLLEHILEYHNNPKEAFSTEGLEKLNKKAINKIGKPIKYITRLDGDINEEEIFRGAVFETDKGSNVYFVMYENNQTKDREFLKPNPSISVLKAIEHKNKIDFFAPNRLGFSRIILSPGDLVYVPTNDQYVLIKDNSSNETIINWDDNEFISNRIYQVKKFTGNSCYFLKNDIASLILSYSASNGVGEFGSQNISEYSVDDPPIRIKDVCIKIRVDRLGNVRPL

SEQ ID NO: 687 - protein, 1137 aa, Bifidobacterium tsurumiense
MGIMYRVGVDVGLNSTGLAAIEVDSEGKPIRILNMQSVIHDGGVDPNSNKTGDTRKLISGIARRTRRMRRRRRARLAKLDHFLSELGLPIEEYGDESFEPWVVRAKLADAYIEDEETRKRFLSIAFRHIARHRGWRNPYKSVQSLYDLNVDDLSKQYESLCSSGGCDKEDGLTPAQIAVEYVRANAGNPAPRFRKSTNQKYSNNQTLFPQRLMQEDNAYEVSYICQQQGIDEDTEHSIISKIFDSKSPRGSAKDRVGKDVLTGEPRALKASLAFQRFRIIAALSNISIKVDGVVRPLNISEKQRAFNVLADMDVKDRPTWSDVAQSLGVTRREIRGIGGIQDGEDRVSNRAPVVESYFALRDAEGALKKLVVKVILPWWNEASDQEREHLIELLSNTIDIDSVRDDLDYASAFDLIDSFDDEALAQLDNLKLPSGRAHIQCGPALTWRIVYSTHPITCMRRANTCMGVTDNWRPPQEPIGKPVGNPSVDRVLKIVNRYLMNVTNRWGRPVSVNIEHVRDGFSSLKVARMYQRDTEQRAKYRDSIFQEMKREDPKIDRYQDSQIKRWEAVQRQGSKCLYCGSLIDFSSCELDHIVPRKGVGATNTKTNLAAVCANCNRNKSNTLFSRWCHSDYASEHGITLKAALERVDSFLFPAGMYNRRESLNFMRAVKARLQQKTEDEAPDNRSIESVAWMADELHKRIDWYYNSERYLSRDTENLPDRQVEVFVYAGKVTAMARRFSGIEKQIHFAGPHGKTRLDRRHHAVDAAVIALMHHGMAMILNEKNELRMAQFYTNQLNQNEMDWKEYPAGTSKGPRYFEWVDDMHSLLELINNALDADRVKVLRNIRLELGNSRAHKDTIHKLVKVRLGDALDAKQINKASTPALYAALTRLPEYNPKNGLPENSDREITVNGKHYAADDDVLFFATDAAQLMVNGGSVEIGDGFHHARVYKCAKFNKAGKQTGFFYGMIRVFAADLVHAAHEDLLSAELPPQSLSMRYGEKRTVDAILSGHAEFVGHLFIGDEIRLNLGKVNYTGQVKEYEEVLRDSSSPHIYSSWVIDGYYSPSRLRLRPLFLSSEGIDKMPIEQQGVLGKMFKPGWLPAVDVLSSFEPEVLRRNGLGEPRWSSNSGLPVSYRWRE

SEQ ID NO: 688 - protein, 1107 aa, Eubacterium ventriosum
MGYTVGLDIGVASVGVAVLDENDNIVEAVSNIFDEADTSNNKVRRTLREGRRTKRRQKTRIEDFKQLWETSGYIIPHKLHLNIIELRNKGLTELLSLDELYCVLLSMLKHRGISYLEDADDGEKGNAYKKGLAFNEKQLKEKMPCEIQLERMKKYGKYHGEFIIEINDEKEYQSNVFTTKAYKKELEKIFETQRCNGNKINTKFIKKYMEIYERKREYYIGPGNEKSRTDYGIYTTRTDEEGNFIDEKNIFGKLIGKCSVYPEEYRASSASYTAQEFNLLNDLNNLKINNEKLTEFQKKEIVEIIKDASSVNMRKIIKKVIDEDIEQYSGARIDKKGKEIYHTFEIYRKLKKELKTINVDIDSFTREELDKTMDILTLNTERESIVKAFDEQKFVYEENLIKKLIEFRKNNQRLFSGWHSFSYKAMLQLIPVMYKEPKEQMQLLTEMNVFKSKKEKYVNYKYIPENEVVKEIYNPVVVKSIRTTVKILNALIKKYGYPESVVIEMPRDKNSDDEKEKIDMNQKKNQEEYEKILNKIYDEKGIEITNKDYKKQKKLVLKLKLWNEQEGLCLYSGKKIAIEDLLNHPEFFEIDHIIPKSISLDDSRSNKVLVYKTENSIKENDTPYHYLTRINGKWGFDEYKANVLELRRRGKIDDKKVNNLLCMEDITKIDVVKGFINRNLNDTRYASRVVLNEMQSFFESRKYCNTKVKVIRGSLTYQMRQDLHLKKNREESYSHHAVDAMLIAFSQKGYEAYRKIQKDCYDFETGEILDKEKWNKYIDDDEFDDILYKERMNEIRKKIIEAEEKVKYNYKIDKKCNRGLCNQTIYGTREKDGKIHKISSYNIYDDKECNSLKKMINSGKGSDLLMYNNDPKTYRDMLKILETYSSEKNPFVAYNKETGDYFRKYSKNHNGPKVEKVKYYSGQINSCIDISHKYGHAKNSKKVVLVSLNPYRTDVYYDNDTGKYYLVGVKYNHIKCVGNKYVIDSETYNELLRKEGVLNSDENLEDLNSKNITYKFSLYKNDIIQYEKGGEYYTERFLSRIKEQKNLIETKPINKPNFQRKNKKGEWENTRNQIALAKTKYVGKLVTDVLGNCYIVNMEKFSLVVDK

SEQ ID NO: 689 - protein, 1397 aa, unidentified
  source 1..1397: note = gamma proteobacterium HTCC5015
MTKNYISPIAIDLGAKFTGVALYQYLEGADCTQEVAKGLLVDDRGNVTWSQEGRRGKRHQVRGYKRRKMAKRLLWLILDSEYGIKREEVTEPLLKFINGLLNRRGYTYISEEVDEESMNVSPLPFSEMMPDYFNSSAPLLEQLAKLLSDKNKLVRFRAEGKIPSNKNEFKKLLDTALDGKYKDEKKELSEAWGNILIASENVLKSTVDGHKSRSEYLANIKEDIKSNEELEKQISSKEIDGFYNLVGHLSNFQLRLLRKYFNDPNMSGVSYWDEKRLEKYFYQWVQGWHTKGGTDEAEKKNIILKTKGAPLLKTLKSLSADLTIPPYEDQNNRRPPKCQSVLLSDEKLTMHYPKWKEWVGQLVKQNDNAYLNENVTLANALHRIVERSRSIDPYQLRLLISITDAEKRNDLAGYKRLKLSLGSEVDEFLLLVKNIVDETKEAREGLWFETENKLFFKCGKTPPRKEKLKSTLLSAVLGKNLSDDEQSSFIEEFWKSGTPKIERRNVRGWCRLASQVQKTYGVYLKEYGLQQLHKLEAGKKLDDKPLALLYKNSGLIASKIGEALNIEPDEVSRFASPHSLAQIFNIIEGDVAGFNKTCRACTYENIWRMQEEKVESLLTNQLLSEIHGERKVPLKSAMCTRLSADSTRPFDGQMASIIEHIARKIAQHKIAQINDVPKEFSIDIPIIIESNQFSFTAELEEIKRGRGSAKAKKAKELGEKSKAGWVSKTERIKTSSEGICPYTGAPLGGSGEIDHIIPRSLTGRTKKTVFNSEANLIYCSSKGNHDKGNRVYVIEQLNDKYLKKQFSTSDVNLIKKKIKTTIQRFTEGGEKLRSFSELSREDQKAFRHALFVPELKSEVTSLLAVKNITRVNGTQAWLAKKIASLLAEHLDKQGRDYTLSAHQIDPWSVSKQRKMLASAEPIWAKKDPQPAASHVVDAVCTFLEALEQPHTASRLKTISSTSFEKTGWRSALIPDLIKVDALDRRPKYRRYNIGSTSLFKDGIYAERFLPILIDENGLMAGYDIDNSLKAKGADVVFESLSPFLLFKGEEVGAQSLSDWQERIDGRYLYMSIDKVKAFDYLQEKVGEKDIAAELLNSIHFTQRKTELRAKFSDDSGKKMKTLDAIRKSLKLTVTVNEIGKRKEKCGFSGTIGIPAKSAWENLLDEPLLETYWGTKMPPQEIWEKVYRKHFPRNIPNQAHRKVRKDFSLPVVDSVSGGFRVKRKTPNGYNYQLLAIDGYSAVGFKKEGDNVDFKSPALVPQIAESKSVTPISSELVHLDKNEIVYFDEWRKIDISDSDLKQFVSSLELAPGSQNRFYIRFTVDEDQFERHFKSALRVNGIQDLDTVNKTFDWNREIPSLLIPPRSNLFLLETGQKITFEYIANGANAEVKKAYSLRRA

SEQ ID NO: 690 - protein, 1378 aa, Streptococcus agalactiae
MNKPYSIGLDIGTNSVGWSIITDDYKVPAKKMRVLGNTDKEYIKKNLIGALLFDGGNTAADRRLKRTARRRYTRRRNRILYLQEIFAEEMSKVDDSFFHRLEDSFLVEEDKRGSKYPIFATMQEEKYYHEKFPTIYHLRKELADKKEKADLRLIYLALAHIIKFRGHFLIEDDRFDVRNTDIQKQYQAFLEIFDTTFENNDLLSQNVDVEAILTDKISKSAKKDRILARYPNQKSTGIFAEFLKLIVGNQADFKKHFNLEDKTPLQFAKDSYDEDLENLLGQIGDEFADLFSAAKKLYDSVLLSGILTVIDLSTKAPLSASMIQRYDEHHEDLKHLKQFVKASLPENYREVFADSSKDGYAGYIEGKTSQEAFYKYLLKLLTKQEGSEYLLEKIKNEDFLRKQRTFDNGSIPHQVHLTELRAIIRRQSEYYPFLKENLDRIEKILTFRIPYYVGPLAREKSDFAWMTRKTDDSIRPWNFEDLVDKEKSAEAFIHRMTNNDLYLPEEKVLPKHSLIYEKFTVYNELTKVRFLAEGFKDFQFLNRKQKETIFNSLFKEKRKVTEKDIISFLNKVDGYEGIAIKGIEKQFNASLSTYHDLKKILGKDFLDNTDNELILEDIIQTLTLFEDREMIKKRLDIYKDFFTESQLKKLYRRHYTGWGRLSAKLINGIRNKENQKTILDYLIDDGSANRNFMQLIKDAGLSFKPIIDKARTGSHSDNLKEVVGELAGSPAIKKGILQSLKIVDELVKVMGYEPEQIVVEMARENQTTAKGLSRSRQRLTTLRESLGNLKSNILEEKKPKYVKDQVENHHLSDDRLFLYYLQNGKDMYTDDELDIDNLSQYDIDHIIPQAFIKDDSIDNRVLVSSAKNRGKSDDVPSIEIVKARKMFWKNLLDAKLMSQRKYDNLTKAERGGLTSDDKARFIQRQLVETRQITKHVARILDERFNNELDSKGRRIRKVKIVTLKSNLVSNFRKEFGFYKIREVNNYHHAHDAYLNAVVAKAILTKYPQLEPEFVYGLYRRKKLSKIVREDKEEKYSEATRKMFFYSNLMNMFKRVVRLADGSIVVRPVIETGRYMGKTAWDKKKHFATVRKVLSYPQNNIVKKTEIQTGGFSKESILAHGNSDKLIPRKTKDIYLDPKKYGGFDSPIVAYSVLVVADIKKGKAQKLKTVTELLGITIMERSRFEKNTSAFLESKGYLNIRDDKLMILPKYSLFELENGRRRLLASAGELQKGNELALPTQFMKFLYLASRYNESKGKPEEIEKKQEFVNQHVSYFDDILQLINDFSNRVILADANLEKINKLYQDNKENIPVDELANNIINLFTFTSLGAPAAFKFFDKIVDRKRYTSTKEVLNSTLIHQSITGLYETRIDLGKLGEG

SEQ ID NO: 691 - protein, 1371 aa, Streptococcus gallolyticus; identical to SEQ ID NO: 157

SEQ ID NO: 692 - protein, 1108 aa, Pseudomonas lini
MAYRLGIDLGTASIGAVAIRIENNEPHSIDWHAVRIFREPVVNTPKGLQPKKAARRDARQLRKQIERRARRLRRIANLIPLLGLQKAEVKLGRGQDLTTLRAIAARQPVELHEFALVLLRLAKRRGYAGGFRDSKDGVVKRSCDKLGEEMRLLAETQNLQEVTLGEYLLYRQDHGLPVWLKAERPGLEPRYALREMVIAEFEQLWTTQARHHPILASSHLGKPLKQWFNEALFYQRPLKSPAHMVGNCLLEPNLPRAPRAHMAAQHFRINKTLHDMRWGSGRRAERLCKAQLDVLRQILNDPANADGKVSFKHLHQALSETGLSDARSRTLNLERSSRDQLPGNSTIARWRTLGLHDQWQMLAPRDQTSVINLLADLGGPELLNTEDWHQNIHKSSAKAGGTNLYRRFRPEVVDFINALRECKDNNGQPAFNRLTAMKFEGGRSSYSVKALEKLNTWFNDPWWPDEGPGAKRGNEIDEEAALRVCYPHRYSQPQELLQRLEAAPTTGNDVVDGALRELRKIINQCIDALGERPEEIVVEMAREIGKGVVWRKEQENRIRQNELARRKIASELEKHGLSANNTRILRYQLWEEQDLHWCPYCAHPINLEAATSGMTHIEHVLPRSLTQIGRKRSELVLAHAGCNDLKADQTPWQAFGHDAERWSAVERAAARFKELGNKSYAKDRAKALGFYRKAELLLLKDYESEVLSDESIADFADRQLHQTSWIAKAAAQWLRTITPLVSVSRGEFTALLRHQWRLDTVIAEARLDEKLPVLDIDACPVSPEAFQQFRKQWEGHPPDNLTERTERKLEKRLDHRHHGIDALVIALTSRSLYISLARRYVEESERRARGERVRHDWSIEPTMHNLRNQALGMVRTCNLTHKPDRNPAGRLFKDTAYGVHFPEEGDRAQLTLRKPLTSLADEKSAEKTRKNLHSIASSEVRLLVLEAFEARLSAGQNPKQALSEPVPYPAYGTGIWRVRCMQGYADDAVRIVHKSRQGEHEKRLLNDGYACLEITAGENGKHQVRLVTQREAQGRGFMENRQQAKRVFKGDTVINRRDGRKYLVGYFKAEGYIFLIPHTDTRNFDKIKEANSGKKRVSFNHAHQLERI

SEQ ID NO: 693 - protein, 1390 aa, Bifidobacterium merycicum
MSRKNIVEDYAISLDIGNASVGWVAFTPNYRLVRAKGHELIGARLFEPASTAEERRMARTTRRRYSRRRWRLRMLDSMFDQALSEVDPSFLMRRKYSWVHPEDKNNEAHWFGGVLFDSNEQDKRFYEKYPTIYHLRKSLMEDDERHDIREVYLAIHHMMKYRGNFLTEGELAPSSVFDVEDFLKLLTEILQYADEGETDEDLELQADANGLTEALCTTKGSRSIRAKNAISILKEGAALSKRQEAIISAVFAGLEGNKLDLTKVFPNKEYTPEDKKTLALYFNKADYDEKRVAIGDSGLLEDNECDFLDCIRRQYSAIALKQLLGDFTSISESMCARYEQHQRNWDLIKRYCREESNAENINKNYGALVGWEIVGGQRRSIRGAKDYENKRKAANKFFEELIKGSALPDQEKERLLHDIENDELFPVQRDSGNGVIPYQLHLNELKKIIQKQGRYYPFLLETYIKDGKEVNKLEGLLAFRVPYYVGPLVSRDDMQSSDNRENHWMIRRKKGVITPWNFDEMVDKDKSGHEFIKSLVGTDSYLLGETTLPKNSLLYQEFEVLNELNNVRLSIRTGNHWADKRRVRLGHNEKKLLLEELFAKQATVTKKAAENLLRRTYGNTYEISGLADEKKFVSSLSSYGKMCRTLKASYVNSHKDVVEKIIELQTVFEDKKTLKHQLQLLGELAETNCELLSNTHYTGWGKLSRKLLTSKVVVCKIGNDFAPAKHSIIEIMRETDRNFMEIITDKDLGVGEWINQQNVGAEDGNSYQDIIDDLRVSPKVKRGINQAIRVIDDISKAVGKEPSRIFLELAGDVQQSARTVSRKSRLQGLYKSAGLQKEFRDLAESLNECSDNDLRDDRLFLYYTQLGKDMYTGEPLNLDRLSSDYDIDHIIPQAVTQNDSLDNRVLVARVANARKTDSFQYLPEIANRMRNFWQELLDAGLISRVKFDRLNRQNDFSSHEKERFVQRSLVETRQIMKNVATIMRKRYGNSAAVIGLNSELTKEMRQYLGFSHKNRDINDYHHAQDALCLGIAGQFAVNRGFFANGMVSDGAVNSYNLYLQDYLRGYREKMSAGERRRNKAFGFIVGSMNSQDSDKRINPKTGEIAWDDEDKVYLRKVMNYRKMLITQKVGDSFGALYNETRYGTSAKEGVNGIPFDKHKQDTALYGGFSSAKTVYVVLIEAKKKTRLVNITMQEYAELGDHPSDDALRAVLAKKKPEYGKARILLRHIPPMQLIRYGGALVTVKSATELNNAQQLWLPYKEYCLFDDVISSAIDVDEARLCQMLDVILDAIQKYYPKQRFDETGLSAFHNAFNEVSAEDKKRIVGEMVGMLHADAKNANLKALGMSGRWGRMSNQSGYTFADSDEFIFQSPSGLFEKRISVGELKKRRAR

SEQ ID NO: 694 - protein, 1204 aa, Prevotella ruminicola
MERILGIDTGTNSLGWAIVDKDENQYHLVAKGTNIFSEGVKIEKGIESSKAAERTEHRSVRKHYWRRKIRKIRLLTILSDNDLCPRLKHEQLRQWRLKKVYPTDDTFMEWQRTEDKAQVNPYKFRYICLTQKLDLSDITQRFILGRALYHLNQRRGFLSNRKEATKESEGTVKEGISSLSKDMKDSGCEYLGEYFYQLYQQGKKIRNHYTARKEHYLKEFKAICSKQELDDALIEKLEKAIFDQRPLKSQKGQVGTCTFEKGKSRCPSSHPLYEDFRMYSFINNIKVQVDTLYDKGERSLTDEEKQLIIPLFKRKSKRTFPFEDIAKKIAGKNNYCYIKSNEEKAYKFNYQMDTQVSGSPVNAQLEEIFGEDWLSSVCEVYTLANNKSRFQIMNDVWHVLFFYDDEDKLKEFAKDRLQLDDELAEKFSKISIPNDYAALSLKAIRKIMPYLRDYGLIYSEAVFLANLVDVLPQHVWGIKEMREAAIENVIDVMHSYDKNNIDGITLEGCVKTFLKERYQVSDDNLKKLYHPSMLDPYPRQRPNDEGVFQLGSPRISSVKNPMAMHSLFRLRKVVNLMLKKGYITPDTKVHIEFSRDLNDANKRWAIQTWQRENEKERERCRKEIEKYIASPSDTDILKYQLWEEQNHKCLYTGDEIRITDFLGDNPKYDIEHTIPRSAGGDSTKMNLTLCSSRFNRDEKKTKLPAELVNHDEILERISNWKEKYEDIDKQIRKISTKGATSKEDKDSKIRRRHYLILQRDYWRGKYQRFTMTEVPEGFSRRQGTDISVISRYARMYLKSVFKQVYIVKGIATSDFRKMWGIQDEYAKKERVNHVHHCIDAITIACIGKAEYDKLADYRHQYDDYLFQGKTKPTFDKPWPSFVIDIKHIQDELLIAHYAKDNLEKFTKKNLRGKDGRIIRDKFGNKLQMKGDTSRNSLHNDKFYGAINHEGEIKYVYRTNIEALDAKSIGNIVDPTVRSIIESAIAIHGSLKAAINKGIWMNEEKHIPIKKVRVFRNDVKKPIELKDQRDLSDKDYKQHYYVTNDGNYMMLIFSKLNNKGREIRQHVVINSLEATEVIKSHKRSQVGKVVWESYYSKEGFDLIYKLKSGTMILLYENNRDEVWDLDIRNLQKRLYIITKMKYDGRIYMMHHQEAREKKDLEEKSGSFKINEDYRPLIVNSYNQFNALVQDLDFEINDLGEIRRLI

SEQ ID NO: 695 - protein, 1396 aa, Lactobacillus mucosae
MDSSKQGLRRYHLGLDIGTNSIGWTAIDDHFSLLRVKGKNAIGVRTFKEGETAADRRGFRTARRRLSRRRWRLQFLDEFFAPYLAEVDPNFLARLKQSDISAKDPAKNQEYMGKLLFPDQEAASDGNGYPTLIQMRKAMPAEKAADFPVFNIYQLRYALMNEKRKFDLREIYLAVHHIVKYRGNFLNNTSVDKFKADQIDFNKSFETLNDLFRQVQPIAPFQIDLTKVDELGKLLLDTKQKKLDRQKAVAKLLPLIEDGTDKEIVKAHQQTAREISKLILGYKAKVGLILQNNLDQTLDMSTENSDDQLMQIAEELDDYQMELINQLSLLYSQIMLNEIVPNGETVSASMLNRYYKHRCQLKELKDYGAAQDKKTREQLDHLYAEYIGQIPKDSKFDFTKDLKKLMDKSDLGQKIKDEIEAGDYLPKQRTSANGVIPHQMHQQELDQIIENQKEYYPWLAEPNPVEKNIKNAKYKLDQLVSFRVPYYVGPMITLADQQKTSKASFAWAVRKKAGKITPWNFYDMIDREKSANNFIKRMTNKDTYLLSEDVLPASSLLYQKFTVLNELNNIRVNGRKLQPALKQAIYTDLFQKRKTVNLKTLTNFLAIHEPTLTKPKIEGLSNGRSFNSSLGTYIDMSKILGDSLDDLNYRDDIEKIIEWSTVFEDSEIYGVKLQEIQWLTNEQREKLVRKRYQGWGRLSKKLLTGITDENGQRIIDLMWDTSKNFMQIVHQPVFEEQIAELNQQLLQDADKAPLEVVDDILADAYTSPQNKKAIRQVVKVVADVVKAVGNAPASISIEFARNEDRNKELKNSRRHSIEKLYHETAEKLVKQTNLLEELGNVKDLNDRYYLYFTQAGRDMYDGTPINIDEISTHYEIDHILPQSFLKDNSLDNRVLVKKSENAAKSDRVPAKLYGAKMRAFWKQLKESQLISNRKYLNLTTDPEQVDKYQMQGFVHRQLVETRQIIKLAANIFGSLYPDSAVIETRAELTKQLREKFSLYKVRDVNDYHHAVDAYLTAFAGHYLYQRYPKLRPMFVYGDYAKIYADDLKRLRSVNLFHDLEKDQYNSGTAVNPETKEKIVDVDWLSDYVSKIQHFKYMLISKAVYTQHGQLYGATILPVAQVDKISAPIGIKDDKPVDIYGAYTNEVAAYMAIVRVNGKKPKYKVVSVPVRMLQRLKMAEQKGHDQYMQTLHDVLLRNFTSLKKNRKTGLKEAVVKDFDVLVPCVRYNQLVIDGDTKFTLGSATYQHNAKQLVLCNHSLETLANNFEYVRKHPDEADERMIMLYDDILDQVNHYFTLYDKNKFREKLNAGRDKYLKLPTFSQFENNKKTAIGKSEAIINILRGLHANAAITNLKCLGVSTPFGQLQSPSGIELSENAKLVYQSPTGLFSREVLLKDL

SEQ ID NO: 696 - protein, 1437 aa, Schleiferia thermophila
MKILGLDLGTNSIGWAIRETDRVCRKEYSNLFKNNLLDLENEIVDYGVIVFKKGVGNGKSGEFSLAAERRKNRSKRRLYNAKRYRKWELLKVLIDNNLCPLTIDELKLWSVGEWVVENGKKRNKGRKYPMSADFLRWLAMDFDKIGTEFTDGEKLKPEFENPYTLRCFLLERKRDDNQKTKYQIGRALYHLAQRRGFKSSRKSGMSTYAENKEIEQKKNLDSSYSISKYAIEKIQSGRFRASGVIQRKYYEEEFLCICKTQGLEEELTKKLFNAVYYVRPLRSQKGLVGKCTLEKNKTRIPISHPVFEEFRALAYINTIQWRVTGSNKPFEPIPIELKKKILEQLFFRKKRNGEIDTRGYFRFDEIIKEFSENFKYEFNYAKYKDNNPELSENKKISDLLKANPNITACPVIAGLMNVFWESWKNKFITDDNKFGIDWSGLKLDYTVKYGRKKGEKRQLDYESIWHLLFDYILTKDDIDKLRIFCNDVLGWNKERIDLFVDIGLSQGYGSLSKNAIKKIIPYLQQGFIYSEAVLFANLEKVLGQEKFVSNKEDILKTIAETIKGVDIYKEKLHIVNSLIQKYFGEVEFKNAKGLDETIIKSAEHEVINKLKEYFGEKNWNIKSETEKKEYYEFVLDKYLTFLDGKQKPEEKASTRLRRNPEIDYYLLPRLDECVKNILSEKFSASDEGLKHLYHPSDIDVYPKAKNKRLGDPVPPSKGWKNPMAMRTMHELKKLINYLLEIGKIDEQTKIVVEMARELNDANLRWAIKTYQKQREEENKEFAKIILGLAQEKYPNLNENDVDNIDKVRLWWEQLPNGEEIYRQVKELKDDVLKYRLWKEQKCQCIYTGKWINITDLFDGTKVQFEHTFPLSDSFDNSLANLTVCDAHYNMNVKQDRIPTQLENYNKDAIGYSAIEPRLKKWFIKRDTLKERIENNKVETKKAIRIGNIERKNYLIRERHLLQFEFDYWDKKLKTFTLKEIPNWWKNSQLIDTQIITKYSSAYLKSLFTKVDVVRARRNSEDIQDGTVNIFKKIYGIKGDEQKDRGRHSHHAIDAAVLTLIPSSTKREEIIKQYFKENKSKNKFHMLPYQNFDTNHILQIEKNIIVNHIVKDKTLVRTKKKVRKRGLVQYTSEGKPMIMQGNSIRGQLHKETFYGAVLVPERNENGYIIKENDKVKLKENEVWIVYRKPIQNVDINEDIIVDELLKKHIQNQINKGVKITAVKDFRGKLIRHLRCRAKAGRGYLTKKKTIELKKNSSNPKKLHKQFVLTQNEENYLYLLYENNVDSKKICREARIVSLFEMQQLLRDGISIKKIWKENELNQLLGLPLRAIIKVGYKVIFYEKNKEELKELKSNELQNRVFIVYKFNEIGSPYIYLQNHIDARIDDEFQKLSHGKDGYTEFDVSKYQYRLKLKARKLNCVFERIDFEIKPDGELIWKF

SEQ ID NO: 697 - protein, 1375 aa, Streptococcus infantarius
MEKSYSIGLDIGTNSVGWAVITDDYKVPAKKMKVLGNTDKKYIKKNLLGALLFDSGETAEVTRLKRTARRRYTRRKNRLRYLQEIFAKEMTKVDESFFQRLEESFLTDDDKTFDSHPIFGNKAEEDAYHQKFPTIYHLRKYLADSQEKADLRLVYLALAHMIKYRGHFLIEGELNAENTDVQKLFNVFVETYDKIVDESHLSEIEVDASSILTEKVSKSRRLENLIKQYPTEKKNTLFGNLIALALGLQPNFKTNFKLSEDAKLQFSKDTYEEDLEELLGKVGDDYADLFISAKNLYDAILLSGILTVDDNSTKAPLSASMIKRYVEHHEDLEKLKEFIKINKLKLYHDIFKDKTKNGYAGYIDNGVKQDEFYKYLKTILTKIDDSDYFLDKIERDDFLRKQRTFDNGSIPHQIHLQEMHSILRRQGDYYPFLKENQAKIEKILTFRIPYYVGPLARKDSRFAWANYHSDEPITPWNFDEVVDKEKSAEKFITRMTLNDLYLPEEKVLPKHSHVYETFTVYNELTKIKYVNEQGESFFFDANMKQEIFDHVFKENRKVTKAKLLSYLNNEFEEFRINDLIGLDKDSKSFNASLGTYHDLKKILDKSFLDDKTNGQIIEDIVLTLTLFEDRDMIHERLQKYSDFFTSQQLKKLERRHYTGWGRLSYKLINGIRNKENNKTILDFLIDDGHANRNFMQLINDESLSFKTIIQEAQVVGDVDDIEAVVHDLPGSPAIKKGILQSVKIVDELVKVMGDNPDNIVIEMARENQTTGYGRNKSNQRLKRLQDSLKEFGSDILSKKKPSYVDSKVENSHLQNDRLFLYYIQNGKDMYTGEELDIDRLSDYDIDHIIPQAFIKDNSIDNKVLTSSAKNRGKSDDVPSIEIVRNRRSYWYKLYKSGLISKRKFDNLTKAERGGLTEADKAGFIKRQLVETRQITKHVAQILDARFNTKRDENDKVIRDVKVITLKSNLVSQFRKEFKFYKVREINDYHHAHDAYLNAVVGTALLKKYPKLTPEFVYGEYKKYDVRKLIAKSSDDYSEMGKATAKYFFYSNLMNFFKTEVKYADGRVFERPDIETNADGEVVWNKQKDFDIVRKVLSYPQVNIVKKVEAQTGGFSKESILSKGDSDKLIPRKTKKVYWNTKKYGGFDSPTVAYSVLVVADIEKGKAKKLKTVKELVGISIMERSFFEENPVSFLEKKGYHNVQEDKLIKLPKYSLFEFEGGRRRLLASATELQKGNEVMLPAHLVELLYHAHRIDSFNSTEHLKYVSEHKKEFEKVLSCVENFSNLYVDVEKNLSKVRAAAESMTNFSLEEISASFINLLTLTALGAPADFNFLGEKIPRKRYTSTKECLSATLIHQSVTGLYETRIDLSKLGEE

SEQ ID NO: 698 - protein, 1391 aa, Lactobacillus jensenii
MKEIKDYIIGLDIGTNSCGYVVTDKQNNILKLKGKTAIGARLFKEGEAAADRRAFRTTRRRLARRRWRLSLLEEIFDEEMNKVDPSFFRRLKESDYSPKDRRKQFNSIVFESSEADKAFYEKYPTIYHLRNALMHDNQKHDLREIFLAVHHIVKYRGNFLREDSVKAFKAAKFTLQGEDGIGPVDKLNDLLKEIYIEAAPELATDNLSKIEDIIKDKKLYKQDKLKQIANLLPKAVDSKDKAKLNKDIAKQVANALMGYMFRLDTLFSFTDVDVKDYKLKFSDANIDESLDALTSLLTDAQIEFVLELQSIYNTIVLNEIVPDGMSLSESMVKKYDDHKKDLKLYKEYIDSLSDQKKAKQLEAAYALYVNYRKADLLAAKKLFEKKKIGDKKFVDVISNFEVFGKFVSDNLDDSELANKIKARLDLGEFLPKQRTNQNGVIPYQLHQVELTQILEKQGKYYPFLITPNPVESHRNNAPYEISELVSFRVPYYVGPLIDNQSIKDKQNKNKFAWMVRQKQGQITPWNFEEMVDTTESANQFIKRMTRKDTYLLAEDVLPKSSLIYQKFMILDELNRIKIDGKKLTSKLKHDIFEKLFKKQKSINLDNLKNYLLAEGNIPGLIEGLSDGINFNNSFSTYIDYRNIFGDEIDNPNKQADFEKMIEWSTVFEDRKIFKRKLKEITWLTPEQIKQVSSKRYSGWGRLSKKLLTQITDENGVNILQRLWNEPETLTEVLANPVIKRKISEANSLFVQINKVENILDDAYTSPQNKKAIRQVIRVVDDIIAAAHGKKPSQIAIEFARSSQNKAKVPDTRKKQLDKIYNKISSEILDSSIKNELKNLKSNKYLSKDKLFLYFKQMGRDAYTGDKLSLDQLQNYDIDHIFPRSFIKDDSLDNRVLTQKPINAKKSDYGIPALEFGNKYVPDLGITVKEMWKLWQENGLISKSKLINLCTNPKKIGSKRASGFINRQLVETSQVIKLVAIILQAEFPDTEIIEVKALQNTTLRESFHLYKNRSVNDYHHAIDAYLTTIVGNYLYQVYPKLRPYFVYGQFKKFNQEKNIDILKRLKNFNFLRQLIFNTDDNIYISGTKEIVFNKKDIIHKLETAYGYKYMNISRECYQETSSLFNQTLYAHNSSVKNSLIPKKKGLPTEIYGGYSGNKDSFFVLVKIVKKRTNLYRIVGIPTRELAKLNSSNNYNQALNKIVESKLCLKETESFKILIKRLLYGTLIVDNGQKFRIGSFKEKHNVQQLVLQLKSMKYIKFYIDGGQNYFTDVERKKLEKQDRDKCLLYVFDDIMNVVNKRFTLFDMSKYEKDGDSLREKFNCLDFNDKVSILSDLLKAFHANSDRTSITKLKITNLGRHQAGKNGITLTTNAQIIYQSPTGLFERRIKIKDL

SEQ ID NO: 699 - protein, 1079 aa, unidentified
  source 1..1079: note = Defluviimonas
MYRFAFDLGTNSLGWAVYRLTNDTRPASIERTGVRIFPNGRDPQSKESNAAGRRMPRGARRRQDRSLGRRKRLLDDLIGFGLLPSDADARSAVFAANPIEARARAAREQVALEQLGRALWHMSKHRGFKSNRRADKDADEKGKIAIASAALLERLRADGHPTYGAFLHARLVRGEGTRIRPAGDGAKLSYEFYPTRALLEAEFDHIWAIQAGFHPSLTEAMHERLRDTIFFQRPLRPVRPGKCTFFPDQDRLPRWHPAAQEFLILSQLNHLRIVDDQGEQPLDITARDLVARTLMAGTKLSWSGLKKTLKLPSQAEFNLEKGGLKELARNDVAARLLGDTKKPGPLATLWPTLDSATQEEILWQISEVADPEELICWLMERLGLSREVAERVEKIPLPDGHLRFCKTATQAIVEKLRCDVIPYDEAVRRAPLLGGAGLDHSDFQAEEGVDTLPPYNRLPVLQRMIGNGTSDPKDTDLLRYGRITNPTVHIALGQFRRVMNALIAEYGKPAQVVIEATRDMAKSAEELNKIEKTIRDNEKRNDRWRAELQKAGLLVEGARIGDRFLRMRLWEEIGRGPADRLCPYTGRPIALHQLHSDEIEIDHILPFEQTFDDSPANKSLCFRDANRRKGKLSPAAAADRQPDFFDLAAIIGRTKHLPANKAWRFLPGAMEKWEETRGFEDRQLNATGYLARVVRAYTEALFPKTDAEGKRRSHVWVLPGRMTAMLRHRWGLNLGDHNRKSRDDHRHHAIDAAVVGVIDRRMVQVLQTHARNLGVERLDRVLPAPPEPFEGFRDAVLAAVEKVNVSHRAQHGSIDPTDPSQTSGRLHEDTVFGLVRDVPENQAERTIGNVVVRKPITGLTEKEIGQVRDVKMRLSLQDATSLARDKSLPEAERKKRLPEALAKWVQETGHRKLRILKPEAGVRPVHDRDGKPYKWLVPGEISWLDILEAPDGTWFQHATDIWAANSGGAEPWNVAHPSARFIMRVHKNDTIQVFDWDDRNKCVVEGSNQIKRIVRLEPSANRMRLVGINDAGKFDERHNEPNDPFRWDLATISKLKLRRARRVRIDELGRVHTIPHGTV

SEQ ID NO: 700 - protein, 1432 aa, Coprobacter fastidiosus
MKKILGLDLGSNSIGWALVNEAENSDEVSSIIKLGVRVNPLTVDEMQNFEKGKSITTNADRTLKRSMRRNLQRYKLRRDALIKLLKKVGFITDGTILSEQGNRTTFETYRLRAKAPDEEISLQELARVLLMINKKRGYKSSRKIKEKEAGTLIDGMEVAKKLYDEDLTPGQLCLQLLESGKKSLPDFYSSDLQEEFDRIWNFQKQFNPKAFCDTAKEEIKGKNKSQTWAILAKYFIWTDEMVVWNEKESKTERVEKECKLVGLKRTVKKEEQRKENYCWRVQALTEQLDLEKVAVVLQEINGQISTSSGYLGAISDRSKVLYFNRQTVGQYQMAELEKNPNTSLRNMVFYRQDYLDEFDKIWEKQAEFHKELTVELKKEIRDIIIFYQRRLKSQKGLIGFCEFENREIMVEKNGKMQAKVVGCKVIPRSHPLFQEFKIWQTLNNVEVFAGEKKCKRKRTDAFPGLFDGTEDTLMVEGWRYLYQEEKEILAKELSVKKSLKKEYILKLLFDNPQDLDMNFEQIEGNDTGNVLFSAYSKMIEKYGYEPLDFGKPTDKIIEQLQVIFADLGWNTDLLFVDLNKEGKDLEKQPYFKLWHLLYSFEGDNTPTGNGKLVEKLMELCHVGKECALELVNISFQNDYGSLSAKAIKKILPYLKEGNRYDVACGYAGYRHSKSSLTKEEIENKVLKDKLDILPKNSLRNPVVEKILNQMVNVINAIIDTYGKPDEIRVELARELKKSAKEREELTKAIAKSTREHEEIRKVLQEEFGMINVSRNDIIRYKLYEELKDNGYKTLYSNQYIPKEKVFSKEIDIEHIIPQARLFDDSLSNKTLEYKAINIEKGNKTAYDFVKEKYGEKGLQQYLNRCESLFKGQRTKLRKLKMGQENIPEGFIDRDLRNTQYIAKKALAMLNEICRRVVATTGSITDRLREDWQLVDVLKELNLPKYETLGLVEVYEDKDGRKIKRIKDWTKRNDHRHHAMDALTVAFTKDVFIQYFNNKNAAWQADCKEHSDIIGIKTRYFENGRSLPPMPLVRFRAEAKSHLETLLVSIKAKNKVVTNNVNCTKRKGGENKKLQQSPRGQLHLETIYGSHRQYVTKEEKVNASFDSSKIATVCKQAYRNALLERLAAFGNDPKKAFTGKNSLEKNPVYLNREQTARVPERVRTVELETVYTIRKPVDPNLSVDKVVDAKVRSILEQRLREYDGEAKRAFVNLDENPIWLNEEKGIAIKRVTIRGINKVQSLHGKKDKNGNLILDETGKKIPVDFVNTGNNHHVAIYRKPVLNKTGQEMLDNEGNPVYELDEVVVSFFEAVTRVNLGLPVIDKNYNKSEGWQFMFTMKQNEYFVFPNEKTRFDPKEVDLLNPENYAVISPNLFRVQKITEKDYMFRHHLETKVVDDKFLKEITWKRILTPNKLEGIVKVRVNHIGQIVSVGEY

SEQ ID NO: 701 - protein, 1131 aa, Acidovorax ebreus
MAQHVFGLDIGIASVGWAILGEQRIIDLGVRCFDKAETAKEGDPLNLTRRQARLLRRRLYRRAWRLTQLSRLLKRKGLIADAKLFAKAPSYGDSAWELRRQGLDRLLTPLEWARVIYHQCKHRGFHWTSKAEEAKADSDAEGGRVKQGLAHTKALMQAKNYRSAAEMVLAEFPDAQRNKRGQYDKALSRVLLGEELALLFATQRRLGNPHASDFFEKLILGDGDRKSGLFWQQKPALSGADLLKMLGKCTFEKGEYRAPKASFSVERHVWLTRLNNLRIVVDGRSRPLNEAERQAALLLPYQTETSKYKTLKNAFIKAGLWGDGVRFGGLAYPSQAQIDAEKTKDPEDQFLVKLPAWHELRKAFKAAGHEALWQQISTPALDGDPTLLDQIATVLSVYKDGAEVVQQLRQLALPEPAASIAVLEKISFDKFSSLSLKALRRIVPLMQSGLRYDEAVAQIPEYGHHSQRIEPGAAKHLYLPPFYEAQRKYAGKGDHIGSMQFRDDADIPRNPVVLRALNQARKVVNALIREYGSPIAVNIEMARDLSRPLDERNKVKRAQEEFRDRNDRARSEFERDFGYKPKAAAFEKWMLYREQLGQCAYSQQPLDIQRVLDDHNYAQVDHALPYSRSYDDSKNNKVLVLTHENQNKGNRTAFEYLTSFPDGEDGERWRTFVAWVQGNKAYRMAKRNRLLRKNYGVDESKGFIDRNLNDTRYICKFFKNYVEEHLQLAARADGDTARRCVVVNGQLTAFLRARWGLTKVRGDSDRHHALDAAVVAACTHGMVKALADYSRRKEISFLQEGFPDPETGEILNPAAFDRARQHFPEPWTHFAHELKARLFTDDLAALREDMQRLGSYTTEDLGRLRTLFVSRAPQRRSGGAVHKETIYAQPESLKQQGGVIEKILLTSLKLQDFDKLLNPESNDHFVEPHRNERLYAAIRQRLEQFGGRADKAFGPDNLFHKPDKNNQPTGPVVRSIKLVRGKQTGIPIRGGLAKNDSMLRVDIFTKAGKFHLVPVYVHHRVTGLPNRAIVAFKDEDEWTLIDESFAFLFSVYPNDYVKVTLKKEQQSGYYSGADRSTGAMNLWAHDRAASVGKDGLIRGIGVKTALSVEKFNVDVLGRIYLAPPETRSGLA

SEQ ID NO: 702 - protein, 1397 aa, Gemella bergeri
MNENKEWFLGLDIGTASVGWAATDTNYNLLKLKGKKSWGVRLFDEAQTAKERRDCRSKRRRLARRKWRLGLLEELFAEEINKIDPNFFMRLRESKYKVSDKTGNVPSILFNEKNYTDKEYYRNYKTIYHLRADLIHKNNPDIRELFLAIHHILKYRGHFLFAGQQFKGSEIKDNIRELLQYNSLNIKIDITDELINNIAEILLKKKNSTDKIIEFKKLFADEKQLIEALRLALGNKTQLAKLFDIEAYKELDISIKTISFKEKIYEDVRSNYEEILGEYIIVLDTAKLIYDAIILSKIKIKNMTISESKVVSYEKHGKDLKQLKHLIKEDCKLSKKEKRQLFENIFVKEDEKGANYVNYIGKNNAGSSKSSCSYEDFKKFLTKELKCCEESKLKQDILAELELETFLPRQRTKDNSVILYQIHKEELEKILNNAVQYHPFLNNTDEYGISIKEKIIQLLEFRIPYYVGPLNTSHKVGDGGFSWSVRNKGYEHIAVTPWNFNKVINKEESAKNFIENLTNQCTYLLYEDVLPKHSLLYSEFALLNELNSINYGGKRLTVEHRNLIIERFFKQSAPKATGKELKKFLMSEGVIDGKDELSGFDVSIKNDLKSYRDFKKILGDKFDSEKVEKMIRWITLFGESKQLLVDKITKEYGDIYSLEEIKKISGLTYKDWGRLSEKLLTEIVSSQLYDESTGECFNIINAMRNNTLLFMELLGTNYDYFEKINIYNRRLRKEITEITPHILDDLYVSPAVKRSIWQVVRIVEELKKIIGSEPKRIFVETTRSNKEKKGDDGRKDSRKKALLELYKKIKTSDIVELEKALGHTVDFDKKKQDLTDIDNNKLKARKLYLYYTQLGRCLYTGKAIDLNNLLSSNSEYDVDHIYPQSKTKDGSWNNLVLVNKTENSKKSNGLISESIQRKNKHFWRFLKAKNLISEEKYKRLTRTEDFTDDELSGFIARQLIETSQSVKAVSQILQNLNPTTEICFSKAENVHDFRQEFGKIKVGKRRNLTEEQQKEAKEGQLIKVRDLNDLHHAKDAYLNIVVGNVYHIKFTRNPKNFIRKNSKNREYTLNTLFYSDKIERNGEVAWEKGKTEKIVSSVMCNNLINVTRRTSEQKGALYDATIYKANAAKEGSYYPVKTKNKNLKDVTRYGGFTSIKIAYYSIFKYDIRNKDKVKENIKIIPIPIYISQNIKTDLDLINFAEKQIKLKKGENIENLQLIYKKLNIGALVKIDYYPYYVGGKTNDNFYIDGAVQVLLSSDIERYLKEVVKFVNFQRENKEAKVSKEHISSEENIELYNTLLCKMTAKIFTHTKNNKYNDLAQDKAKNTFKNLSLEEQCKVLLEILNLLTNKKTTFDLSLINEKASRVKCGFNLLNQKQFSIIEQSVTGLYEKEIKIIED

SEQ ID NO: 703 - protein, 1401 aa, Olsenella profusa
MEKGKHMNLRNTTDEYNIGLDMGTNSVGWAVTDKVGAIAHFKGMPTLGSRLFDAAQTAAEARAHRGQRRRYVRRRWRLDLLQSLFQDEIDKVDSEFFIRLRQSRLHVEDREDGHADYKWPIFNDSDFTEVDYYKRFPTIYHLRKWLIETDQKADIRLIYLAVHNIVKHRGNFLRENNKNLSSRNADPAEAVGHLRLALNNWCLERGYECAWKSGGNDNAILNVLIDGEKRRSDQVREIAKLTGIDCGDAKQSRQCNEAIAKAIVGLKAEMKNIFGEFPAEKTLIYLSSDDDVEVVRDACPDDSVELFQALCELYAAYILQGLLSYAPGQTISVNMVKKYDRYGEDLHLLKELTRTYASKRYDAFFRGETYEGSSDYVVDKAQGYTRYNLGTTQLSYDDFQKAVKELFKGTDALQDERYQGMMVAFGEQRFLRRLKTSDNGSIYYQLHLEELHAILENQGKHYPFLLAEEDKIESLVSFRIPYYVGPLTRENAAVGHDGKERFAWSSRRDGMEHAVITPWNWEEIIDRDKSAEDFIIRMTGDCTYLQGEPVLPKCSLLYEEFCALNELNGAHWTIDEDDERRFDAAQRERIMCDLFRSTRKVTYKKVSDWLEREDSFVGARVHGGQGEHGFESQLGSYIFFCKDVFKTDSLDEADYPMIEQIILWSTLFEDRDILRRKIEEAYGDRLTTEQIKVICKKRFAGWGRLSKKLLTGIKVDTDTGRKSIIDVLREGNPNDGQRSRTMVFMEVLRDEGLGFQKAVDDFNRDYFSEHNNGLMDVNDLPGSPAIRRSINQAVRIVDEIVSIAKKEPANIFIEVTREEDDPRKKGKRTKRRYDAIKSALEVFKKDDPQLWKELTKKDSNNMDERLSLYFMQRGKCMYSGRPIKIEELHTGKYEVDHIIPRSYIKDDSLENKVLVYREENQHKTDTLLIDSSIRRKMGKYWRMLHNAKLIGDKKFRNLFRDHIDDKTMKGFVARQIVETSQMVKLVQTLLEARYPGARIVPVKANISHDLRDAAGLVKCREANDFHHAHDAFLACRVGLFIQKRHPSVYDNPIGLAHIMRDYARAQAREYKKSHYLAHTKGFIVNSFLSSGFDKETGEVFKDDWDAEAEVEGIRRVLNYRQCFISRMPVEATGTFWDQTIYSPKCGKKLTLPLKRGLDPDRYGSYSREQFAYFFIYEARDLKHERHILQFAQVPVRVAAHIAKDPSQLESYAVKLAGQANLAFVRIVRRRILKKQLLELNGDRLIITGVREVRNATEFAFSLDEETLIERCVQIAKVGSLIGVVNDEDEEQLSADLNELFSSLVKRGPKLCNRLYAQLKLDKYLSKFDELTLTDKAKVVLQLIAITNGSINMADLSALGSSKYAGCMQVSYFKQLNAPIGEVNIIDQSVTGMFERRTHIGL

SEQ ID NO: 704 - protein, 1103 aa, Actinomyces sp.
MTKINDDLRYRVGIDVGLKSIGFCAVEVDENDQPLRLLNSMVFVHDAGVDPNENKAAKSRKLTAGVARRTQRGTAQNRRRLAELDRALSEELNWPLPNLEDFEDSYEPWHTRAELVEHYIKDDAERAEALAIAIRHIARHRGWRNPYLSVDSLLTPQEPSKFLRGLNERVTQALGREFPADATPGQLICAYIDSPKYAETQGIRGDSGILSGKLHQFDNVGEIRKICEVQRLDHDVFKLLVRKVFFAKSPRGSAAGLVGHDQIPGQGKYIRAEKAHPDFQLFRIVAVLTNLRIREGKAERCLTPDELRGLVDYILEVQLKQQVTWADLADNLGIERTDLRGTARASFDGSPALRFPPTDVTAEKIMASKVKWLKDWWDKADSERRGFMVDALSNSGGSTGDNDIDDEVAALLEAATEDEQAELEKIQLPQGRAAYSLDSLRRLTKRMLEEGVDLHTARKEEFNVDDDWRPEPEPIEAPVGNPAVDRVLKQVARWLNMATDRWGVPDVINIEHTRDGLGSEKVARELLRESQKRQDLNQKDMDKMIRELGISGKARRSSLIKYQAIQRQNSMCLYCGTEIGFETAEMDHIVPRALSGSTNDRSNLAAVCRACNHQKGAVPFAVWATSGEAHAGVSLEDAIKRVRLWQKGPGMSPKQHKAFQNEVISRLKSRKPDEEFDGRSMESVAWMAVELRTRIDGYYRKVNSDSVPKVGIYRGQLTAEARKASGFENRVNLIGGKGKTRFDRRHHAMDALVIAMMNQSVSQTLALRVNMRESQRITGQEETWKNFYGKPGQASERFEKWREGMLRAVELFNIELAKNAIPFHENVRLRVGSSKVHDDTVRKFIHAKLGEALSVAMIDCAETPALWTALTRLPDFDPKDGLPEDLSREIYIHSRKITADEQLNFFNSPSACLKVRGGYVEIGSSIHHARVYRIDGKKTTYSMVRVFATDLVKMTHEDVFTTPLKPSTISMRTADPKIRKALADGTATQIGWLVEGDELQLETDKYSGGLIGEVLAEYPQLTSWRVAGFYGVTQLRLRPYMLAAEGIPSDASESLRKVIEGKGWLPAINALLSSGCVKVVRRNCLGEPRFNAKSSLPVSQLLR

SEQ ID NO: 705 - protein, 1217 aa, Prevotella disiens
MEKQRILGLDPGTNSLGWAVLDFDNSKQEYNLVRKGEVIFEEGVGKSERGEFSKAAYRTFYKSTRKHYFRRRLRKIEVLKVLVKYDFCPYLSDDLLKQWHEKKIYPAVKEFMDWQRTSDAEGKNPYYDRHCCLNEKLDLSLKSDRYILGRALYHLTQRRGFKSNRLIQNNDENEEGKVKKGISELSTEMQEANCNYLGDYFYKLYTEKGNTVQIRKRYTDREKHYKNEFNAICEKQELNETIVKELDKAIFFQRKLKPQRHGVGKCTFEPNNRRCAISHPDFERFRMLCFINNIKIKTPFEENLRPLNNEEKALIEPLFYRKSIKNFDFEEIAKKLAGKNNYCYIKDDSSKQYKFNYRMSQGASTCQTIAKLKSIFGEEWKNGIAETYTNRRKKEGLKKQAEMVDDIWNVLYSVSECDVLKDFAINKLQLDEKTADNFSKTKLAQGFATLSLKAIRKILPFLEQGFGYTEAVFLANIPTVVGKEYWNNEDIRNDIMEEIKTIFYHNTLKTNDSHNTILFCIKDILSNNFDLAPGAIDKLYHPSMINVYKDVIPNEDGILQLGSPKIDAVKNPMAMRSLHIIRKVVNELLREGIINSDTEVRIEYARELNDANKRHAIADWQKKQYGKHQKYRKEIKELFKAETGFEIEPNETDILKFELWEEQNHICLYTGQEIGISEFVGENPKYDIEHTFPRSLGGDSTKMNMTLCENKFNRENKQKKLPSELANHSEILERIDDWKKKIYILQKKYDSIRTHNGMDKENKDKKIVSRHKIKLELDYWKGKYNRFTMTEIPEGFSRRQGMGIGLISRYAGLYLKTIFHKKDNPQKSNVYIVKGSITAEFRRIWNIQDDYEKKCRDNHIHHCIDAIVVGCIGKREYDLMAQFYRDEEKYRWEKKKKPFFKKPWETFTQDMLSLKDEVLTVHFNPSNFTKKAHKKVFTPKGIFVAQGDCARVKLHKGSYFGAIEQKGEIKYVMRKELSALKIEDIKNIVDAVVKEKVLAVVKKKGFKQAMAEPIYMNEDKRILIKKVRLFVSQANPLIVKKHRDLSSKEYKQNYYVDNEGNLMIAMYEGVKKNGKIDREITVVNNLEAAKFFRQSQKNNAEKQLISHLSPKNGYPLKTVLTQKQLVLMYEDSPKEIKLRDTKNMVKRLYQVFGIEKDGRVKLKFHQEARSEGLNINSAAFKIQDTPESLYRHTKSNLKVLVNGVDFKINILGEISLI

SEQ ID NO: 706 - protein, 1391 aa, Lactobacillus kunkeei
MKNYHIGLDIGTSSVGFAARDDDNNLIRVKGKNVIGTRLFSEGQTAQERRMARASRRRYNRRKWRLRLLDEIFHDEIIHKDAEFFNRLKQSSLSPKDERKQYFGSLLFPEVGDSEYYHDGNQTIYHLRHRLMTQDEKADIREIYLALRHIIKYRGNFLDDTPVSSFEASDLKLASFVPTLNDLFETIDVNYEFSMDNINEIEDILLNNKLRNSDKSKQLPDLLTEPIVNIDDKSLEKQFNKERTDISKEIAKSVVGSKMNVNKLLSFESSGGYKIAFSFSDASSEDKMMELSDVLDDSRMNILNILKVIYSRVRLNQIIPSGMGLSESMVAAYDLHKQQLKDLKKLLNVLPFNERYAVKIAYAAYIGNIDKQKFTKSEVKTIDKLKEKSAIMNVLDFKSGHITNEELSNVIKVVIVDKYLNDENFEYHSIVEKINQDISNGSYLLKQRNNQNGNIPHQLHQMELDQIIENQSKYYPFLGELNPNSNRNHIAKYKISELVAFRVPYYVGPLITPEEQEKTSGASFAWMKRKEDGAITPWNFEEKVDKEETASRFIKRLTVKDTYLLNEDVLPDNSLLYEKFKVLNELNVVKANNKRLTVEEKQGAFDNLFKKMKTVTAKKLKNYLVSNHNHINSVEITGLSDVDKFNNSLSTYIDFKKIFDDKIDNPDLLDDFEDIIEWSTVFEDRKIFEEKVRKDISWISESEIKAVVSKRYSGWGRLSKKLLNGITNNEGRNIIDELWEESETFMEAVSKPEVKEQIDGINSDFIKNTDIESVLADAYTSPQNKKAIRETHKLVKDIQKAMGGQAPASISIEFTRNPQDKGQLTRSRHSEVSRKYKEISKEVSKTLNDELKSKKNSMDVDKYYLYFMQMGIDLYDGSSIDIDDLNNYQIDHIIPQSFYKDDSFDNRVLTHYSNNQKKGNNTPLNGLNIDDKTRAIWNHLRDLGLITKKKYNGLTLKGMDQLSKYTKHGFIRRQLVETSQVIKLVANILSDEFSTDDTKIIEVKAKMNSQIRQVFNLYKVRELNDYHHAVDAYLTTFIGGYLYNRYPNLRNMFVYGDFKKFSADVDNLKTFNFLHDITNPSDKFEDRIFDEKSGELILDRKHAIETIKKIYQYKYMLITREVSTKNGQLSDQTVYSAKRINNVKAPIPVKKDSNPELYGFRTGNVDHHMVIVKYPKKDSYDYKVVGIPLRFVQKLKETKDNKDYENLLNQIVQMKLNRKKQDFIVVVDNVMYGQLIQDGGEKYTLGSSTYKYNAKQLVINMDKTRILEDNRYLNSLDEGEVSEKLVNIYNDIMKVVNSRFDLFDINKFREKLNDGLNKFKNISNEQKEETLLKILSGLHCGSANVPIKELGLTTPLGKLQLPSGIVLSEEAVVIYQSPSGLFENKVRLKDL

SEQ ID NO: 707 - protein, 1352 aa, Megasphaera sp.
MKKRNREEYYVGLDIGTSSVGWAVATPDYRIPKFRGHKMWGSRLFAEGKRAAERRQFRTNRRRLARRRDRLQILEELFAEEMAKVDNTFFMRLKESKFFLEDKTVKEKHILFSTDKFDADRFYKDNPTIYHVRKRLMEEEPQDIRELFLAVHHILKYRGHFLFAGSLEQNGASIEELVRTLLGKQGLAILDDTIDSNEMVNILKNTGETKSDRKKDVQELWNPLKDKVKKAQAAEMAGLVLGLKSDISKLFANSDYKDLDSSIKNINFSSGDYEEKRDDYANSIGDDIVLLDTMKALYDTLILSQILQGKRSISAAKVEDYNTHKEQLRALKAILKPHKRLYNEMFRENNKKDLSNYVAYISSYSEGKRVNREGFYKYVQAVLKQVDDSDSKQAILEAIRLETFLPLLRVKDNAVIPHQIHQAELEAILETARKKYNFLNDVSDGVSVKDKIIQLFTFRIPYYVGPLNPHSGETVADRKQGTGWVVRKQRGKVYPWNFADMVDVKASAEAFITNLTNKCTYLIGEDVLPKRSLLYSEFMLLNELNMIKYDGHELPVAIKQLYIEQVFKQEHKKQTKGRVLDFLKRNGLITGSATAVITGMDDAIKGDLQSYRDMVRIFGAGFDHSMAERIIRWVTLFGEAKDILENKIREVYGNSISDSQMRAIKKLKYADWGRLSQAFLIAVKGCDKSGVERNIITCLRASSQNLMEILSDQGTYIKQIKAWNHQHTTNMMDTLDYQLVDDLYVAPSVKRSIWQSLCIVEELVKIMGQAPKKIFVEVTRTKQAEKTKKDSRKKRLVELYTAIGKEGAAWKKEIEAHQAGDFRRKKLYLYYTQMGRCMYSNEPIAMDALFTSAYDIDHIYPQSLTKDGSWDNLVLVKSQLNKEKSDQYPLRPAIREKNKAHWQYLCRAGFISEKKYERLMRTTELTAEELSGFIARQLVETSQATKAVTGLLERIYTNTEICFVKAETVSQFRHQHNFIKIRELNNYHHAKDAYLNIVVGNVYHEKFTKNPWEFIARSTERRPYNLNRMYDFDLLKQGRVIWQVPKSLETVQAMMKSNDVRITKKLLVQKGELYDATITKAHKAKEGTYFPLKGADARLRDVHRYGGYEKIKIAYYSVFSCREKASNTIHTLIIPIPVYKAGLLQTEADLTAYAWQTKQKTKPIKDIYSAITPIYKKLCINTVVKIDGFKYFLGGKTGDYMWLDPAIPVVLDEQAAAYLKAISKVGRADDVENTAQAIDLITAEANEAFYDVLLKKMEAKIFAKAYQTIVEKLASETARERFRELSIGAQCSCLLEILNLLANNKTTFTFFKDKMGVTMSRRKQPMDLTKLEECIVYETSITGLYEKAVSLL

SEQ ID NO: 708 - protein, 1421 aa, Streptococcus sanguinis
MTKFNKNYSIGLDIGVSSVGYAVVTEDYRVPAFKFKVLGNTEKEKIKKNLIGSTTFVSAQPAKGTRVFRVNRRRIDRRNHRITYLRDIFQKEIEKVDKNFYRRLDESFRVLGDKSEDLQIKQPFFGDKELETAYHKKYPTIYHLRKHLADADKNSPVADIREVYMAISHILKYRGHFLTLDKINPNNINMQNSWIDFIESCQEVFDLEISDESKNIADIFKSSENRQEKVKKILPYFQQELLKKDKSIFKQLLQLLFGLKTKFKDCFELEEEPDLNFSKENYDENLENFLGSLEEDFSDVFAKLKVLRDTILLSGMLTYTGATHARFSATMVERYEEHRKDLQRFKFFIKQNLSEQDYLDIFGRKTQNGFDVDKETKGYVGYITNKMVLTNPQKQKTIQQNFYDYISGKITGIEGAEYFLNKISDGTFLRKLRTSDNGAIPNQIHAYELEKIIERQGKDYPFLLENKDKLLSILTFKIPYYVGPLAKGSNSRFAWIKRATSSDILDDNDEDTRNGKIRPWNYQKLINMDETRDAFITNLIGNDIILLNEKVLPKRSLIYEEVMLQNELTRVKYKDKYGKAHFFDSELRQNIINGLFKNNSKRVNAKSLIKYLSDNHKDLNAIEIVSGVEKGKSFNSTLKTYNDLKTIFSEELLDSEIYQKELEEIIKVITVFDDKKSIKNYLTKFFGHLEILDEEKINQLSKLRYSGWGRYSAKLLLDIRDEDTGFNLLQFLRNDEENRNLTKLISDNTLSFEPKIKDIQSKSTIEDDIFDEIKKLAGSPAIKRGILNSIKIVDELVQIIGYPPHNIVIEMARENMTTEEGQKKAKTRKTKLESALKNIENSLLENGKVPHSDEQLQSEKLYLYYLQNGKDMYTLDKTGSPAPLYLDQLDQYEVDHIIPYSFLPIDSIDNKVLTHRENNQQKLNNIPDKETVANMKPFWEKLYNAKLISQTKYQRLTTSERTPDGVLTESMKAGFIERQLVETRQIIKHVARILDNRFSDTKIITLKSQLITNFRNTFHIAKIRELNDYHHAHDAYLAVVVGQTLLKVYPKLAPELIYGHHAHFNRHEENKATLRKHLYSNIMRFFNNPDSKVSKDIWDCNRDLPIIKDVIYNSQINFVKRTMIKKGAFYNQNPVGKFNKQLAANNRYPLKTKALCLDTSIYGGYGPMNSALSIIIIAERFNEKKGKIETVKEFHDIFIIDYEKFNNNPFQFLNDTSENGFLKKNNINRVLGFYRIPKYSLMQKIDGTRMLFESKSNLHKATQFKLTKTQNELFFHMKRLLTKSNLMDLKSKSAIKESQNFILKHKEEFDNISNQLSAFSQKMLGNTTSLKNLIKGYNERKIKEIDIRDETIKYFYDNFIKMFSFVKSGAPKDINDFFDNKCTVARMRPKPDKKLLNATLIHQSITGLYETRIDLSKLGED

SEQ ID NO: 709 - protein, 1391 aa, Lactobacillus paragasseri
MTKIKNEYIVGLDVGTNSCGWVAMDFQNTILRMHGKTAIGSHLFDAGNSAADRRAFRTTRRRIKRRKWRLKLLEEIFDPYMTEVDPYFFARLKESGLSPLDKRKNVSSIVFPTALEDKKFYCNYPTIYHLRYDLMSEDKKFDLREIYLAIHHIVKYRGNFLYNTPVKDFEASKIDVKDSLEKLNELYERLDSEFTVELDSSNALEIEKIIRDKKVFKINKVKSIHQLLSLKTENKERTKLIKDVSKQIINAILGYKTKFETILLKNISKDEADDWEFKLTDVDADNKFENLIGDLNENEQEILLEIRNLANAITLSNIVEEGKTLSESMIDKYNKHSDDLELLKQVISDHPDRDKAKKLALAYDLYVNNRHGKLLQAKDVLGSKKTLSKEDFYKEVKKNLDDSKASQEILDTIALDSFMPKQRTNENGVIPYQLHQLELDRIIKNQGKYYPFLKEVNPVSSHLKEAPYKLDELIRFRVPYYVGPLISPNESTKNKQTKKNQNFAWMIRKEQGQITPWNFDQKVDRMASANKFIKRMTTKDTYLLGEDVLPANSLLYQKFTVLNELNNIKINGKRISVPLKEELYNNLFKKNSTVTTNKLKSYLKENYNLINVEIKGLADEKKFNSGLTTYNKLRNLKIFDQQLDDLNYDKDFERIIEWSTIFEDKAIYKDKLKTIKWLSDRQIDKLSKIRMQGWGQLSKKLLSQLTDNNGQTIIEQLWDSQNNFMQIVNQSDFKDAIAVANQNLLVNTSVEDILNEAYTSPANKKAIRQVVKVVDDIVKAASGKVPKQIAIEFTRDADDKAKISQTRANKLRKVYKELSNELASETIRNELERVAKDQKLLKDKYYLYFMQLGRDAYTGEPINIDDLGQYDIDHILPQSFIKDDSLENRVLVKKAVNNGKSDNVPVKLYGNRMAADLGMTIRHMWEKWKDQGLITKTKYNNLIIDPDKINKYESSGFIHRQLVETSQIIKLVSTILQSKYPDTEIIVVKARYNHYLRKHLNLYKSREVNDYHHAIDAYLSAICGNLLYQVYPYLRPFFVYGQYKKFSSDPKKEKIIYDKTRKYNFISQIFENKSNDIISLETKKKVFDKKDIIEKLKHAYNYKYMLVSRETETHDQEMFKMTVYPRLSRDTKKSRNLISKKKDMPTEIYGGYTNNSDAYMVIARINKKKGTEYRVFGVPMRELVNLRKAEKNGRYNAYLKQVLEPEIMYSKNGKKNKTISSFEIVKAKVPYKQVILDGDKKFMLASSTYVQNAKQLTLSQNSMQAITDNCENDTEEEKALEEKALIEAYDEILTNIDKYLPLFDINKFREKLHAGREKFINLSLDVKKDTILQVLNGLHDNAVMPKIKSLGLSTPLGFMQFSSGVPLSENAKLIYQSPTGLFEKRVKISDL

SEQ ID NO: 710 - protein, 1117 aa, Actinomyces sp.
MKQYNAGIDVGINSVGFAAIEVDSKGLPLNILNNMVVLHDSGVDPGTAKTGATRLANSGTARRTRKLIARRRKRLQKLDRYIEVQGWPLVDFSSLPDPYTPWKIRAKLTQDRLEGEEQGRGLSIALRHMARHRGWRNPYEGVESLHSPKEASKQFKDLKDRVTKVSGVIFDEDATPAEVVCDIGLSPKQRLRSAPSAKYKEGATLADEPVGGKSKEGLLGGKLMQSDNANELRKIGIVQGLSNEKVNEIIDQVFASESPKGQAGKRAKKDELPGQEQYVRALRAHLAFQRFRIVAAVANLRILEAEPKHERLLSQSEKDKVIEFLMSADGDDGVTWSDVAEELGIERECLSGTAKRGADGERPSSFPPTNSTNISIVRSKVKPLIEWWRKASDDEQATLVTALSNADELTDDQPSAETVRQFLSSPDEQSQEKIDKISLPKGRAAYSVNSLERLTRRMLKDSVDLFEARKREFGVDNNWTPTPDSIGEPVGNPAVDRVLKIVNRWLLAVTRKWGPPKVVNIEHVRVGFTSAAQTRKYEEENKTNRERNLAILEELRDKFGTSGKIRREDITRFAALRRQNCQCAYCGEAITFFDCEMDHIVPRKGPGSTNTRNNLVAICERCNKSKSNMPFSLWAQNCDIPGVSVEAVIDRVRTWIKDPELNPKQYNNFKKDVIERLRKTVDDDAIDNRSIESVAWMATELADRIGSHFRTAGANTKVRVYRGWLTSEARKASGFEGKINLIGGRGKTRLDRRHHAMDAATIALMRQSVAQTLVERASIRESDRLRRVVSSSWKDYRGADRDKQFSYGSWLNSMNALAELFNRAIDADGIPVTQNLRLRLGNGEAHDATIRSLEKKRVGASWTIGEIDRASTPQLWLALTRQEDFDQNDGLPANASRELRVKNHWFHAEENVTLFPTKSAAIAVRGGYAEIGNTIHHARLYKLPGKKLTYGMIRVFAIDLLCAWHTDLFSSPLLPESISLRTAETKVRRAVEDGAAMYIGWLVDGDEIVLDPETKAFKSNKIGEYLCEFPGTKRWKVDGFPDKEKLRLRPLQLAGEGLPEDVSAGTEEILGPKGNGWRVAINALFKSSQLVVVRRTALGMVRKLSRRHLPLTTRLRG

SEQ ID NO: 711 - protein, 1000 aa, Campylobacter subantarcticus
MKILGFDIGINSIGWAFVENDELKDCGVRIFTKAENPKNKESLALPRRNARSSRRRLKRRKARLIAIKRILAKELKLNFKDYVAADGELPKAYEGSLASVYELRYKALTQKLETKDLARVILHIAKHRGYMNKNEKKSNDAKKGKILSALKNNALKLENYQSVGEYFYKEFFQKYKENTKNFIKIRNTKDNYNNCVLSSDLEKELKFILEKQKEFGYKYSEGFINEILKVAFFQRPLKDFSHLVGACTFFEEENRACKNSYSAWEFVALTKIINEIKSLEKISGEIVSTQTINEVLNLILDKGSITYKKFRSCINLHESISFKSLKYDKENAENAKLIDFRKLVEFKKALGVHSLSRQELDQISTHVTLIKDNVKLKTVLEKYNLSNEQINNLLEIEFNDYINLSFKALGMILPLMREGKRYDEACEITNLKPKTVDEKKDFLPAFCDSIFAHELSNPVVNRAISEYRKVLNALLKKYDKVHKIHLELARDVGLSKKAREKIEKEQKENQAVNAWALKECENIGLKASAKNILKLKLWKEQKEICIYSGNKISIEHLKDEKALEVDHIYPYSRSFDDSFMNKVLVFTKENQEKLNKTPFEAFGKNIEKWSKIQTLAQNLPYKKKNKILDENFKDKQQEDFISRNLNDTRYIATLITKYTKEYLNFLPLNENENTNLKSGEKGSKIHVQTVNGMLTSVLRHTWGFDKKDRNNHLHHALDAIIVAYSTNSIIKAFSDFKKNQELLKARFYAKELTSDNYKHQVKFFEPFKGFREKILSKIDEIFVSKPPRKRARGALHKETFYSEDEMIKKYNSKEGLQIALSCGRVRKIGTKYVENDTMVRVDIFKKQNKFYAIPIYAMDFALGILPNKIVVVGKDKNNNPKQWQTIDESYEFCFSLYKNDLIMLQKKDMQEAEFAYYNGFDISTSSICVEKHDSKFENLTSNQKLLFSNAKEGSVKVENLGIQNLKIFEKYIITPLGDKIKADFQPRENISLKTSKKNGL

SEQ ID NO: 712 - protein, 1138 aa, Acidothermus cellulolyticus
MGGSEVGTVPVTWRLGVDVGERSIGLAAVSYEEDKPKEILAAVSWIHDGGVGDERSGASRLALRGMARRARRLRRFRRARLRDLDMLLSELGWTPLPDKNVSPVDAWLARKRLAEEYVVDETERRRLLGYAVSHMARHRGWRNPWTTIKDLKNLPQPSDSWERTRESLEARYSVSLEPGTVGQWAGYLLQRAPGIRLNPTQQSAGRRAELSNATAFETRLRQEDVLWELRCIADVQGLPEDVVSNVIDAVFCQKRPSVPAERIGRDPLDPSQLRASRACLEFQEYRIVAAVANLRIRDGSGSRPLSLEERNAVIEALLAQTERSLTWSDIALEILKLPNESDLTSVPEEDGPSSLAYSQFAPFDETSARIAEFIAKNRRKIPTFAQWWQEQDRTSRSDLVAALADNSIAGEEEQELLVHLPDAELEALEGLALPSGRVAYSRLTLSGLTRVMRDDGVDVHNARKTCFGVDDNWRPPLPALHEATGHPVVDRNLAILRKFLSSATMRWGPPQSIVVELARGASESRERQAEEEAARRAHRKANDRIRAELRASGLSDPSPADLVRARLLELYDCHCMYCGAPISWENSELDHIVPRTDGGSNRHENLAITCGACNKEKGRRPFASWAETSNRVQLRDVIDRVQKLKYSGNMYWTRDEFSRYKKSVVARLKRRTSDPEVIQSIESTGYAAVALRDRLLSYGEKNGVAQVAVFRGGVTAEARRWLDISIERLFSRVAIFAQSTSTKRLDRRHHAVDAVVLTTLTPGVAKTLADARSRRVSAEFWRRPSDVNRHSTEEPQSPAYRQWKESCSGLGDLLISTAARDSIAVAAPLRLRPTGALHEETLRAFSEHTVGAAWKGAELRRIVEPEVYAAFLALTDPGGRFLKVSPSEDVLPADENRHIVLSDRVLGPRDRVKLFPDDRGSIRVRGGAAYIASFHHARVFRWGSSHSPSFALLRVSLADLAVAGLLRDGVDVFTAELPPWTPAWRYASIALVKAVESGDAKQVGWLVPGDELDFGPEGVTTAAGDLSMFLKYFPERHWVVTGFEDDKRINLKPAFLSAEQAEVLRTERSDRPDTLTEAGEILAQFFPRCWRATVAKVLCHPGLTVIRRTALGQPRWRRGHLPYSWRPWSADPWSGGTP

SEQ ID NO: 713 - protein, 1172 aa, Streptococcus iniae
MRKPYSIGLDIGTNSVGWAVITDDYKVPSKKMRIQGTTDRTSIKKNLIGALLFDNGETAEATRLKRTTRRRYTRRKYRIKELQKIFSSEMNELDIAFFPRLSESFLVSDDKEFENHPIFGNLKDEITYHNDYPTIYHLRQTLADSDQKADLRLIYLALAHIIKFRGHFLIEGNLDSENTDVHVLFLNLVNIYNNLFEEDIVETASIDAEKILTSKTSKSRRLENLIAEIPNQKRNMLFGNLVSLALGLTPNFKTNFELLEDAKLQISKDSYEEDLDNLLAQIGDQYADLFIAAKKLSDAILLSDIITVKGASTKAPLSASMVQRYEEHQQDLALLKNLVKKQIPEKYKEIFDNKEKNGYAGYIDGKTSQEEFYKYIKPILLKLDGTEKLISKLEREDFLRKQRTFDNGSIPHQIHLNELKAIIRRQEKFYPFLKENQKKIEKLFTFKIPYYVGPLANGQSSFAWLKRQSNESITPWNFEEVVDQEASARAFIERMTNFDTYLPEEKVLPKHSPLYEMFMVYNELTKVKYQTEGMKRPVFLSSEDKEEIVNLLFKKERKVTVKQLKEEYFSKMKCFHTVTILGVEDRFNASLGTYHDLLKIFKDKAFLDDEANQDILEEIVWTLTLFEDQAMIERRLVKYADVFEKSVLKKLKKRHYTGWGRLSQKLINGIKDKQTGKTILGFLKDDGVANRNFMQLINDSSLDFAKIIKNEQEKTIKNESLEETIANLAGSPAIKKGILQSIKIVDEIVKIMGQNPDNIVIEMARENQSTMQGIKNSRQRLRKLEEVHKNTGSKILKEYNVSNTQLQSDRLYLYLLQDGKDMYTGKELDYDNLSQYDIDHIIPQSFIKDNSIDNTVLTTQASNRGKSDNVPNIETVNKMKSFWYKQLKSGAISQRKFDHLTKAERGALSDFDKAGFIKRQLVETRQITKHVAQILDSRFNSNLTEDSKSNRNVKIITLKSKMVSDFRKDFGFYKLREVNDYHHAQDAYLNAVVGTALLKKYPKLEAEFVYGDYKHYDLAKLMIQPDSSLGKATTRMFFYSNLMNFFKKEIKLADDTIFTRPQIEVNTETGEIVWDKVKDMQTIRKVMSYPQVNIVMKTEVQTGGFSKESIWPKGDSDKLIARKKSWDPKKYGGFDSPIIAYSVLVVAKNCKRKNSKTKNYQRTCGNKNNGTR

SEQ ID NO: 714 - protein, 1195 aa, Elusimicrobium minutum
MQKNINTKQNHIYIKQAQKIKEKLGDKPYRIGLDLGVGSIGFAIVSMEENDGNVLLPKEIIMVGSRIFKASAGAADRKLSRGQRNNHRHTRERMRYLWKVLAEQKLALPVPADLDRKENSSEGETSAKRFLGDVLQKDIYELRVKSLDERLSLQELGYVLYHIAGHRGSSAIRTFENDSEEAQKENTENKKIAGNIKRLMAKKNYRTYGEYLYKEFFENKEKHKREKISNAANNHKFSPTRDLVIKEAEAILKKQAGKDGFHKELTEEYIEKLTKAIGYESEKLIPESGFCPYLKDEKRLPASHKLNEERRLWETLNNARYSDPIVDIVTGEITGYYEKQFTKEQKQKLFDYLLTGSELTPAQTKKLLGLKNTNFEDIILQGRDKKAQKIKGYKLIKLESMPFWARLSEAQQDSFLYDWNSCPDEKLLTEKLSNEYHLTEEEIDNAFNEIVLSSSYAPLGKSAMLIILEKIKNDLSYTEAVEEALKEGKLTKEKQAIKDRLPYYGAVLQESTQKIIAKGFSPQFKDKGYKTPHTNKYELEYGRIANPVVHQTLNELRKLVNEIIDILGKKPCEIGLETARELKKSAEDRSKLSREQNDNESNRNRIYEIYIRPQQQVIITRRENPRNYILKFELLEEQKSQCPFCGGQISPNDIINNQADIEHLFPIAESEDNGRNNLVISHSACNADKAKRSPWAAFASAAKDSKYDYNRILSNVKENIPHKAWRFNQGAFEKFIENKPMAARFKTDNSYISKVAHKYLACLFEKPNIICVKGSLTAQLRMAWGLQGLMIPFAKQLITEKESESFNKDVNSNKKIRLDNRHHALDAIVIAYASRGYGNLLNKMAGKDYKINYSERNWLSKILLPPNNIVWENIDADLESFESSVKTALKNAFISVKHDHSDNGELVKGTMYKIFYSERGYTLTTYKKLSALKLTDPQKKKTPKDFLETALLKFKGRESEMKNEKIKSAIENNKRLFDVIQDNLEKAKKLLEEENEKSKAEGKKEKNINDASIYQKAISLSGDKYVQLSKKEPGKFFAISKPTPTTTGYGYDTGDSLCVDLYYDNKGKLCGEIIRKIDAQQKNPLKYKEQGFTLFERIYGGDILEVDFDIHSDKNSFRNNTGSAPENRVFIKVGTFTEITNNNIQIWFGNIIKSTGGQDDSFTINSMQQYNPRKLILSSCGFIKYRSPILKNKEG

SEQ ID NO: 715 - protein, 1032 aa, unidentified
  source 1..1032: note = uncultured Termite group 1 bacterium
MKKRILGLDIGIASVGWALVEFDDEFQDNKKKGTIIKSGVRIFTRAETPKERESLAKPRREARSQRRRIRRRVERLNSIRELFVKNGVVEEWSVSKKNPNNIYITLNQIKTPWQLRMESLDRKLTNEQFAVVLTHLAKHRGYKSLRKDDKAGKVLEAISQNKKRLNDSDYRTLGEMFCKNESYKEHKRNKGGEYINSVARELIEEEVEKIFVKQREKGNNFADVNTEREYLKIAFSQKPAGSISKMVGFCTFENGEKRAPRDSYSAELFKVLCTINNTTFTDMKTGEIRSFSKEEIGKTLETVKNVKDVKYAKIRKDLGLEDSVKFSGVDYRENAKSKGEGEIFVSMKTYHEIKSKIEKLSKEKWDNLKGNTELLDSIVNIIANLKDDESIKKEFQKLKIDEDIIDVLLNFEFKKFINLSFKALRKIIPFQFQGQKYITASTSAGYSLKQEGIKNKLVPPAKENINVAVVARAFAQTRKVINAVIRKYGQFDQINIELATELKNSKFDRSKIEEGQKKFQSQKDKIFKEVQELRGGMTPSSSLLLKYRLWREQDERCVYSGRKISFEDLLDTGFLDIDHIIPYSKSMDDSFNNKVLCLAEENRNKKNDIPFNYYQRIDRDWNLLISIITSMKNMKIAKKSRLLKQELSDIEGFIERNINDTRYATRYIKDFLENNLEFKENEFIKVKVQARSGGLTSVLSYNWGMSKDREESYFHHAKDAIIVACSTQGMVQYISKISQQYENDKDKMKKIKDKTENCIPKPWDSFRADVEESIEGIFVSFAPRHKVTGSAHKETIYSKKHLEKERYVTVKKSLDKIKLSDLENIPCNENCGIIRVLKERLEKFKNDSLKAFADPVHMPTKCPNKKGPVIRSVKIKESNKTGIEVRKGLAERGEMVRVDVFIKDKKYYLVPIYVSDFKNKDLPNKAIAALKLENEWIMIDKTYSFKFSLFKDDLIKIKKKKEEIFGYFGGVHRSTGTIKIKSRHKPKEIDEGIGSRCLLDFRKFQVDVLGNYTEVKHEKRMPAYITRKDKKH

SEQ ID NO: 716 - protein, 1064 aa, Simonsiella muelleri
MMEKFHYVLGLDLGIASVGWAAIEIDKETETSIGLLDCGVRTFERAEVPKTGDSLAKARREARSTRRLIRRRSHRLLRLKRLLKREIFRQPETFKDLPINAWQLRVKGLDSRLNEYEWAAVLLHLVKHRGYLSQRKSEMSETDSKSEMGRLLAGVAENHQLLQQEQYRTPAELALKKFVKHFRNKGGDYAHTFNRLDLQAELHLLFQKQRELGNPFTSPELERQVDDLLMTQRSALQGDAILKMLGHCGFEPEQFKAAKNTFSAERFIWLTKLNNLRIQDQGKERALTADERTKLLDEPYKKSKLTYAQVRKLLSLPQTAIFKGLRYDLEHDKKAENSTLMEMKSYHNIRQTLEKSGLKTEWQSIATQPEILDAIGTAFSIYKTDEDISHELKTCRLPENVLNELLKNINFDGFIQLSLTALRKILPLMEQGYRYDEACTQIYGNHHSGSLQQESKQFLPHIPIDDVRNPVVFRTLTQARKVVNAIIRRYGSPARVHIEMARELGKSKSDRDRIEKQQQKNKKERENAVAKFKEDFPDFVGEPRGKDILKMRLYEQQHGKCLYSGHDIDINRLNEKGYVEIDHALPFSRTWDDSQNNKVLVLGSENQNKRNQTPDEYLDGANNSQRWLEFQARVQTCHFSYGKKQRIQLAKLDDETEKGFLERNLNDTRYIARFMCQFVQENLYLTGKGKRLVFASNGGMTATLRNLWGLRKVREDNDRHHALDAIVVACSTASMQQKITKAFQRHESIEYVDTETGEVKFRIPQPWDFFRQEVMIRVFSDQPCEDLVEKLSARPEALHDNVTPLFVSRAPNRKMSGQGHLETIKSAKRLSEENSMVKKPLTTLKLKDIPEIVGYPSREPQLYAALKTRLETHDDDPIKAFAKPFYKPNKNGELGALVRSVRVKGVQNTGVMVHDGKGIADNATMVRVDVYTKAGKNYLVPVYVWQVAQGILPNRAVTSGKSEADWDLIDESFEFKFSLSRGDLVEMISNKGRIFGYYNGLDRANGSIGIREHDLEKSKGKDGVHRVGVKTATAFNKYHVDPLGKEIHRCSSEPRPTLKIKSKK

SEQ ID NO: 717 - protein, 1371 aa, Gordonibacter pamelaeae
MNLRNVESYQVGLDIGTGSVGWAVLDDNGDLCRFKGKPTWGSRVFPTAETAAEARVHRGQRRRYDRRRQRIDLLQRFFADEVAKVDPEFFIRLNQARLHPENRDPAHADYRWPLFNGSNFTEKDYYRQFPTIYHLRAHLLKSDEPADIRLVYLALHNIVKHRGNFLHQDNPSLSARNANVGDAVEALCLALDEWCGAHDVECACDEAALAEALGDASLRPGEKRERAEAALGVEKAHKKLAKAVSSAVVGYAAEFGHVFFAESEGSKFALSNDEKVEAYVCPDEGRDLFDAMRAVHSSYVLMGILSEAQGELLSVCKVGEYERYKRDLETLKSLVRAYGPERYDEFFCGPFYEGTRDYDPGKAQGYTKYNLGASKLSHEDFLKEVQKLLKDIGAQADERYADIERAIEAGAFLRRLKTSDNGTIPYQLHLEEMDAIIERQAAFYPFLAQEKDKLKSLVSFRIPYYVGPLTQKNAARDGKGEARFAWSSRKPGMEDARVYPWNWEDVIDKDQSAEDFIRRMTGTCTYLKGEPVLARCSLDYELFCVLNELAGARWTQDGDKSYRFDAADRLGIVEDLFKKRKRVTYEAAEKWLARTHGPESGKSAGGAYHVSGGQGEDAFESQLSSHYDFCKILGVDELSDADEAMAEDIILWNTVFEDRSILKRKIKLAYGDRLGDAQVRKLCQKRYTGWGRLSGELLRGLRSATDNGPKTIMDILLEGDPNHARRMGAAMNLMEILHDDLLEFQAKIDEHNRERALAVGGMSVDEVTGSPALRRGINQALRVVDEIAGIAGKPPAHIYVEVTRDEGARNKGRRTTSRYRALEAALSSIKAQCADVYAELKERDPRALDDERLTLYFMQCGKCMYSGDALDINKLQTYQVDHILPQSYVKDDSFENKVLVRPDTNQRKGDTLLLDERLIARMRGFWRTLRDAELIGEKKFNNLTRTSVSDEQMKKFVSRQLVETGQMVKQVQQLLQARYPESEVQPVKAGVSHQLRVGCALAKSREINDFHHAHDAYLACQVGRFVQYRHSAVYSEPVKMAAVVKQFIKKQAEDYRRTRELPGSDGFIVSSFMTPGFDVKTGEVFRDAWDAGAEIDRIRRCFDYKDCFISRMPEETHGAFWDATIYSPRAAGKTLSLPLKRGLDPRKYGSYSREQFAYFFVYEAVKPKKKQRVLEFAPVPVRVASALANDPDALEDYARELAEAEGLVFERIRRRKVYKYQQIIVGDSRLYVTGREEVRNARQLAFSQDETKLICRIEQGEECEEGELLDLFRSMQRKYLACAPRLARLMKVAEMEEGFIAATASGKREVLLSLTSIAAAHRNSIDLKPIGRKGSSGQMKITFSKELSTNGILFVDSSVTGMFERRCRLGL

SEQ ID NO: 718 - protein, 1269 aa, Mycoplasma synoviae
MENNNKEKIVIGFDLGVASVGWSIVNAETKEVIDLGVRLFSEPEKADYRRAKRTTRRLLRRKKFKREKFHKLILKNAEIFGLQSRNEILNVYKDQSSKYRNILKLKINALKEEIKPSELVWILRDYLQNRGYFYKNEKLTDEFVSNSFPSKKLHEHYEKYGFFRGSVKLDNKLDNKKDKAKEKDEEEESDAKKESEELIFSNKQWINEIVKVFENQSYLTESFKEEYLKLFNYVRPFNKGPGSKNSRTAYGVFSTDIDPETNKFKDYSNIWDKTIGKCSLFEEEIRAPKNLPSALIFNLQNEICTIKNEFTEFKNWWLNAEQKSEILKFVFTELFNWKDKKYSDKKFNKNLQDKIKKYLLNFALENFNLNEEILKNRDLENDTVLGLKGVKYYEKSNATADAALEFSSLKPLYVFIKFLKEKKLDLNYLLGLENTEILYFLDSIYLAISYSSDLKERNEWFKKLLKELYPKIKNNNLEIIENVEDIFEITDQEKFESFSKTHSLSREAFNHIIPLLLSNNEGKNYESLKHSNEELKKRTEKAELKAQQNQKYLKDNFLKEALVPLSVKTSVLQAIKIFNQIIKNFGKKYEISQVVIEMARELTKPNLEKLLNNATNSNIKILKEKLDQTEKFDDFTKKKFIDKIENSVVFRNKLFLWFEQDRKDPYTQLDIKINEIEDETEIDHVIPYSKSADDSWFNKLLVKKSTNQLKKNKTVWEYYQNESDPEAKWNKFVAWAKRIYLVQKSDKESKDNSEKNSIFKNKKPNLKFKNITKKLFDPYKDLGFLARNLNDTRYATKVFRDQLNNYSKHHSKDDENKLFKVVCMNGSITSFLRKSMWRKNEEQVYRFNFWKKDRDQFFHHAVDASIIAIFSLLTKTLYNKLRVYESYDVQRREDGVYLINKETGEVKKADKDYWKDQHNFLKIRENAIEIKNVLNNVDFQNQVRYSRKANTKLNTQLFNETLYGVKEFENNFYKLEKVNLFSRKDLRKFILEDLNEESEKNKKNENGSRKRILTEKYIVDEILQILENEEFKDSKSDINALNKYMDSLPSKFSEFFSQDFINKCKKENSLILTFDAIKHNDPKKVIKIKNLKFFREDATLKNKQAVHKDSKNQIKSFYESYKCVGFIWLKNKNDLEESIFVPINSRVIHFGDKDKDIFDFDSYNKEKLLNEINLKRPENKKFNSINEIEFVKFVKPGALLLNFENQQIYYISTLESSSLRAKIKLLNKMDKGKAVSMKKITNPDEYKIIEHVNPLGINLNWTKKLENNN

SEQ ID NO: 719 - protein, 1110 aa, Helicobacter apodemus
MRILGFDIGITSIGWAYVEGEELKDCGVRIFTKAENPQNGDSLAAPRREARGVRRRLARRKVRLNVIKRLLCKEFGLNLSDYFANDGELPKAYETTKDTKSPYELRSLALEQKLEPKELARVILHIAKHRGYGNKHAKRDLEAEEKAKKAAEKAPQEKESTTTNGDSKKEQEKVLKALYQNETLLKKYQTNYQTNNKTNDETNNKTIFLVGKYLYKEFQDKGQRIRNTTNNYQHTMRQEWLKDELEFIFKKQKDFGATFSENFESQILETAFYQRDLKSFEDKVGKCVFYENENRAPKDSLSAMEFVALTRIINTLKNLEKKSKNLGIGETYGKDKIQEILKIVLDKGEMSYKELRKILKLNESILFAKDSKLDYTKGMQEAEKAKFIELKNLKAFKKAMGGDFSKFPREELDKIATDIVLIKSKENLAKKLQNYSALSKEQVEALSNLNFAKHIDLSLKALDKILPFMREGLSYDEVVKKVGLQEHRKYKQKGEFLIPLKEYEPYLANPVVARALSEYRKVLNALLRKYGNVHKIHLEFTREAGKNYDERKKIEKEQREHFEANQKAIKQREILGLPINGANILKMKLWIEQGECCVYSGEKITSKHFFDSNALQVDHIYPYSRSFDDSYMNKVLVFAKENQNKLNKTPFEAFGSDKEKWDRILSLSAKLPKQKQRRISNKDFKDKELGFIARNINDTGYIARLASQWTNNCLKFEDLRENEVTIAGEKGSKNHLEVISGQLTSMLRHYWGLGDKDRNNHLHHAVDAVIIAYTNAKTIKAFADFKKNQEQNRAKFYAKQISEQEYKRQRNPFEPCANFRQRVEEKINKIFVSKPPRKRARGALHKETFGSICLDGNNNWVARFKIKSKKEQEDITKEKATKAKYKDEFKGEENIRKALKLGKIRRINNTQKDIAIGDKIVKNETMVRVDIFKDKKGKFYAVPIYTMDFALGILPNKAVATGEDEDGVIKDWIEMDKTKYEFCFSLFKDDLIKVRKKKMKEAELCYFVGFDTDGSRIIVAKHNNDYQTMTENECKLFTLKEKKKKQKTLNDEEDNQERIETEYKIIGGRTGIQNLETFEKHQVSPLGEVQKAEFEDRQEIKLKSSPKGKD

SEQ ID NO: 720 - protein, 1339 aa, Staphylococcus pseudintermedius
MEVSVMGRKPYILSLDIGTGSVGYACMDKGFNVLKYHDKDALGVYLFDGALTAQERRQFRTSRRRKNRRIKRLGLLQELLAPLVQNPNFYQFQRQFAWKNDNMDFKNKSLSEVLSFLGYESKKYPTIYHLQEALLLKDEKFDPELIYMALYHLVKYRGHFLFDHLKIENLTNNDNMHDFVELIETYENLNNIKLNLDYEKTKVIYEILKDNEMTKNDRAKRVKNMEKKLEQFSIMLLGLKFNEGKLFNHADNAEELKGANQSHTFADNYEENLTPFLTVEQSEFIERANKIYLSLTLQDILKGKKSMAMSKVAAYDKFRNELKQVKDIVYKADSTRTQFKKIFVSSKKSLKQYDATPNDQTFSSLCLFDQYLIRPKKQYSLLIKELKKIIPQDSELYFEAENDTLLKVLNTTDNASIPMQINLYEAETILRNQQKYHAEITDEMIEKVLSLIQFRIPYYVGPLVNDHTASKFGWMERKSNESIKPWNFDEVVDRSKSATQFIRRMTNKCSYLINEDVLPKNSLLYQEMEVLNELNATQIRLQTDPKNRKYRMMPQIKLFAVEHIFKKYKTVSHSKFLEIMLNSNHRENFMNHGEKLSIFGTQDDKKFASKLSSYQDMTKIFGDIEGKRAQIEEIIQWITIFEDKKILVQKLKECYPELTSKQINQLKKLNYSGWGRLSEKLLTHAYQGHSIIELLRHSDENFMEILTNDVYGFQNFIKEENQVQSNKIQHQDIANLTTSPALKKGIWSTIKLVRELTSIFGEPEKIIMEFATEDQQKGKKQKSRKQLWDDNIKKNKLKSVDEYKYIIDVANKLNNEQLQQEKLWLYLSQNGKCMYSGQSIDLDALLSPNATKHYEVDHIFPRSFIKDDSIDNKVLVIKKMNQTKGDQVPLQFIQQPYERIAYWKSLNKAGLISDSKLHKLMKPEFTAMDKEGFIQRQLVETRQISVHVRDFLKEEYPNTKVIPMKAKMVSEFRKKFDIPKIRQMNDAHHAIDAYLNGVVYHGAQLAYPNVDLFDFNFKWEKVREKWKALGEFNTKQKSRELFFFKKLEKMEVSQGERLISKIKLDMNHFKINYSRKLANIPQQFYNQTAVSPKTAELKYESNKSNEVVYKGLTPYQTYVVAIKSVNKKGKEKMEYQMIDHYVFDFYKFQNGNEKELALYLAQRENKDEVLDAQIVYSLNKGDLLYINNHPCYFVSRKEVINAKQFELTVEQQLSLYNVMNNKETNVEKLLIEYDFIAEKVINEYHHYLNSKLKEKRVRTFFSESNQTHEDFIKALDELFKVVTASATRSDKIGSRKNSMTHRAFLGKGKDVKIAYTSISGLKTTKPKSLFKLAESRNEL

SEQ ID NO: 721 - protein, 1428 aa, Parasutterella excrementihominis
MGKTHIIGVGLDLGGTYTGTFITSHPSDEAEHRDHSSAFTVVNSEKLSFSSKSRTAVRHRVRSYKGFDLRRRLLLLVAEYQLLQKKQTLAPEERENLRIALSGYLKRRGYARTEAETDTSVLESLDPSVFSSAPSFTNFFNDSEPLNIQWEAIANSPETTKALNKELSGQKEADFKKYIKTSFPEYSAKEILANYVEGRRAILDASKYIANLQSLGHKHRSKYLSDILQDMKRDSRITRLSEAFGSTDNLWRIIGNISNLQERAVRWYFNDAKFEQGQEQLDAVKLKNVLVRALKYLRSDDKEWSASQKQIIQSLEQSGDVLDVLAGLDPDRTIPPYEDQNNRRPPEDQTLYLNPKALSSEYGEKWKSWANKFAGAYPLLTEDLTEILKNTDRKSRIKIRSDVLPDSDYRLAYILQRAFDRSIALDECSIRRTAEDFENGVVIKNEKLEDVLSGHQLEEFLEFANRYYQETAKAKNGLWFPENALLERADLHPPMKNKILNVIVGQALGVSPAEGTDFIEEIWNSKVKGRSTVRSICNAIENERKTYGPYFSEDYKFVKTALKEGKTEKELSKKFAAVIKVLKMVSEVVPFIGKELRLSDEAQSKFDNLYSLAQLYNLIETERNGFSKVSLAAHLENAWRMTMTDGSAQCCRLPADCVRPFDGFIRKAIDRNSWEVAKRIAEEVKKSVDFTNGTVKIPVAIEANSFNFTASLTDLKYIQLKEQKLKKKLEDIQRNEENQEKRWLSKEERIRADSHGICAYTGRPLDDVGEIDHIIPRSLTLKKSESIYNSEVNLIFVSAQGNQEKKNNIYLLSNLAKNYLAAVFGTSDLSQITNEIESTVLQLKAAGRLGYFDLLSEKERACARHALFLNSDSEARRAVIDVLGSRRKASVNGTQAWFVRSIFSKVRQALAAWTQETGNELIFDAISVPAADSSEMRKRFAEYRPEFRKPKVQPVASHSIDAMCIYLAACSDPFKTKRMGSQLAIYEPINFDNLFTGSCQVIQNTPRNFSDKTNIANSPIFKETIYAERFLDIIVSRGEIFIGYPSNMPFEEKPNRISIGGKDPFSILSVLGAYLDKAPSSEKEKLTIYRVVKNKAFELFSKVAGSKFTAEEDKAAKILEALHFVTVKQDVAATVSDLIKSKKELSKDSIENLAKQKGCLKKVEYSSKEFKFKGSLIIPAAVEWGKVLWNVFKENTAEELKDENALRKALEAAWPSSFGTRNLHSKAKRVFSLPVVATQSGAVRIRRKTAFGDFVYQSQDTNNLYSSFPVKNGKLDWSSPIIHPALQNRNLTAYGYRFVDHDRSISMSEFREVYNKDDLMRIELAQGTSSRRYLRVEMPGEKFLAWFGENSISLGSSFKFSVSEVFDNKIYTENAEFTKFLPKPREDNKHNGTIFFELVGPRVIFNYIVGGAASSLKEIFSEAGKERS

SEQ ID NO: 722 - protein, 1396 aa, Streptococcus anginosus
MTKPYSIGLDIGTNSVGWAVITDDYKVPAKKMKVLGNTNRDYIKKNLLGALLFDGGETAEGRRLKRTARRRYTRRKNRLRYLQEIFAEEMMQVDESFFQRLDDSFLVEEDKQGSKYPIFGTLKEEKEYHKKFKTIYHLREELANSKEKADLRLVYLALAHMIKFRGHFLYEGDLKAENTDVQALFKDFVEEYDKTIEESHLSEITVDALSILTEKVSKSSRLENLIAHYPTEKKNTLFGNLIALSLGLQANFKTNFQLSEDAKLQFSKDTYEEDLEGLLGEVGDEYADLFVSAKNLYDAILLSGILTVDDNSTKAPLSASMVKRYKEHKEELAAFKRFIKEKLPKKYEEIFKDDTKNGYAGYVGADKKLRKRSGKLATEEEFYKYVKGILNKVEGADYFLDKIDREDFLRKQRTFDNGSIPHQIHLQEMHAILRRQGEHYPFLKENQDKIEKILTFRIPYYVGPLARKGSRFAWAEYKADEKITPWNFDDILDKEKSAEKFITRMTLNDLYLPEEKVLPKHSPLYETFTVYNELTKVKYVNEQGEAKFFDTNMKQEIFDHVFKENRKVTKDKLLNYLNKEFEEFRIVNLTGLDKENKAFNASLGTYHDLRKILDKSFLDDKVNEKIIEDIIQTLTLFEDREMIRQRLQKYSDIFTTQQLKELERRHYTGWGRLSYKLINGIRNKENKKTILDYLIDDGYANRNFMQLINDDALSFKEEIARAQIIGDVDDIANVVHDLPGSPAIKKGILQSVKIVDELVKVMGHNPTNIIIEMARENQTTDKGRRNSQQRLKLLQDSLKNLDNPVNIKNVENQQLQNDRLFLYYIQNGKDMYTGETLDINNLSQYDIDHIIPQAFIKDNSLDNRVLTRSDKNRGKSDDVPSIEVVHEMKSFWSKLLSVKLITQRKFDNLTKAERGGLTENDKAGFIKRQLVETRQITKHVAQVLDARFNAKHDENKKVIRDVKIITLKSNLVSQFRKDFKFYKVREINDYHHAHDAYLNAVIGTALLKKYPKLASEFVYGEFKKYDVRKFIAKSDKEIGKATAKYFFYSNLMNFFKKEVKFADGTVVERPDIETSEDGEIAWNKQTDFKIVRKVLSYPQVNIVKKTEVQTHGLDRGKPRGLFNANPSPKPKPDSSENLVGIKRNLDPKKYGGYAGISNSYAVLVKAIIEKGVKKKETMVLEFQGISILDRITFEKDKRAFLLGKGYKDIKKIIELPKYSLFELKDGSRRMLASILSTNNKRGEIHKGNELFVPQKFTTLLYHAKRINNPINKDHIEYVKKHRDDFKELLNYVLEFNEKYVGATKNGERLKEAVADFDSKSNEEICTSFLGAVNSKNAGLFELTSLGSASDFEFLGVKIPRYRDYTPSSLLKDSILIHQSITGLYETRIDLSKLGED

SEQ ID NO: 723 - protein, 1344 aa, Staphylococcus simulans
MKKTNPYILSLDIGTASIGYACMDLDFNILKYHDKDAIGVLTFEGADTAAERRGFRTSRRRKNRRIKRLGLLQEVLAPLVKNPNYYQLLNLHKWKNSNEDFKHRSLSEVLKILGKNPKTYPTIYHLQQDIQNHPEKKFEPELIFLALYHLVKYRGHFLFNNLSFDKGKTVDNEAQLSELLEQYQSINPYEDSISNKDINVIVDTLKDDQLTRNDKSKELKRNVSKTHAELFKMLVGLKFKQSILFENMENAEDIKESATGSDAISLSDDYYENLSEFLTDEQLNFIESANTFFMGIMLDRILKGATSISAAKVRDYKIFKNQLKIIKDIVYQNKYDKYHEFFVTSKEDMRAYQENPDAKTFGKLSKFDQYLIHPKDQYAKLMKDLKGIVPKKYTEVLNLIDEQKFLVVQNTTDNASIPYQNNVFEAENILRNQQKYYPEITEEMIGKVINLISFRIPYYVGPLTNKNGQSDFAWMIRKSDEQTLPWNFDKVIDKSKSAEKFIRRMTSKCTYLLEEDVLPKHSLLYQEMEVLNELNNVQLRGENEPKHRIHRLDPKVKQFIYHNLFQKKKNVTHKDLITLLQNSEHRNTLNKTSGQKLKVFGTQNDSKFASKLSTYNDMKAIFGSVENKRQMIEELVLWITIFEDKAILKQKIGEKYPNITEKQLNQIVKLNYSGWGRLSEKLLTKEVNGRSLIDLMYSTENNFMEIITDKTLGFDCFIKNSNKVKNAKISYKDVAELRTSPALKKGIWNAIKMVREISDLFGAPEKIIIEFATEDQVKGKRQKSRSELWDDLVKKNNLKRNKKFKGLFEELKAYPDLDFSNPKLWLYIHQNGKCMYTKKPIDLERLMSDTNNQLYEIDHILPRTFVKDDSINNKVLVIQSANQKKSGDKMPLEIFDNHVLVPFWKMLYENDLISSSKLSKLMKKEFNDLDKEGFIQRQLVETRQIISHVSDFLTEEYPSTTVVPMKANVVSELRRKFDIPKIRQLNDWHHAVDAYLNGFVYQAARVFYPKVNLFEFNFKWEKVREKWRQLGEFTENNKKREFFLFKRMENYVNEHGEGMISKLIFDLDNFKFNYSRKVESTESAFYKQSAFSPKNTTAQYDSDKNKTAIYKEMKNKRGIVVSYTYVKKDQELIGYGVFNETVFEYVNNADVDMNTRALKIVRKAFPKLDIKKAQYLFSINKGDALLVNGHPFLFVSAKERINGKQLEFDINMQRRLKKALRPYNKMTEQEKVGVYNQFAEKVVQEYENSLGAKTRNEKLELIRNQFNESDKSNEALIQCILEVLKMTKVSAERSVKLKIRWGSQTPNTLIDINNKAKIMYNSITGLKQTRLKSIYKLAESKNEL

SEQ ID NO: 724 - protein, 1391 aa, unidentified
  source 1..1391: note = Lactobacillus
MIIRTYELKTITTIAILKMFQLLTGGLSMTKLGKPYGIGVDIGSNSIGFAAVDENSHLIRLKGKTVIGARLFEEGKAAADRRASRTTRRRLSRNRWRLSFLRDFFESHITPTDPNFFMRQKYSEISPKDKARYKYEKRLFNDRTDAEFYQQYPTMYHLRNRLLTDPSKADVREIYFAIHHILKSRGHFLTSGYAKDFNTNKVALNEIFPALQDAYAQVYPDLDITFDENKVNEFKTVLLDEKATPSDTQRALVNLLLAEDGDKDILKQQKQVLTEFAKAVVGLKMKLNVALGTEVDSSEATAWNFSLGQLDDKWAGIESAMTDEGTEILDQIRDLYRARLLNGIVPAGKTLSQAKVDDYEQHHEDLELFKDYLKQLEDDGMAKVIRQLYDRYIDGDDAKPFVREDFVKALTKEVTAHPNAKSPELLERLVQPDFMLKQRNKANGAIPVQMQQRELDQIIKNQSVYYDWLAAPNPVEKHRQSMPYQLDELLNFRIPYYVGPLVTAKEQKAAQGGVFAWMVRKDPDGNITPYNFDEKVDREASANTFIQRMKTTDTYLIGEDVLPKQSLLYQSYEVLNELNNVRVNDNKLSFDQKQQVLGELFERHNTVTIKQFVDNLLAHGDYDRIPEVRGLADEKRFLSSLSTYNQLKGILHEAIDDSDKQTDIEKIIAWSTIFEDKAIFKTKLNEISWLTAGMINSLANIRYRGWGQFSHKLLNELTLSTGRTVFEELLISSHNLMQILTDEVLKQKIAELNAHELKASGIYAAIDDAYTSPSNKKALRQVLSVIDDITNAAGQAPNWLYIETADGDGVPGKRTNSRQRKIQEIYANAAQELITGSVRGELEDKIASRADFTDRLVLYFMQGGRDIYTGEPLNIDNLSSYDIDHILPQSLIKDNSLDNRVLVHPLVNREKDTIFASTRFAKQMNGMWRQWHAAGLISSRKLRNLQMRPDEIDKYASGFVARQLVETRQIIKLTEQIVADQYPDAKIIAVKAGLSSQLRKELDFPKNREVNHYHHAFDAFLAARIGTYLLKRYPNLEPFFTYGKFKKTEVKKLKSLKSFNFIRDMTHAKDKIVAKETGEIVWDNASDINELDRIYNFKRMLITHEVRFETASLFKQTLYAAKNSKNRGGSRQLIPKKKGYLVDIYGGYTQETGSYLSVVRLTKKAMYAVVKVSTRDAAKLAVAKSISEQKENETLKKIIDGKLSKTSKKGKTTHQLFEIVLPRVGQKTLFKNSKYNQFLVNSDTYMHNYQELWMPREYQRMWKDILLSNHGDAQLEGQLDQIFKFIVSQVNSYFNLYDINQFRKKIADATDKFAKLPTHDTDNARGKIATIGQLLIGLQANAMRSDLRNLDIKTPFGLLQIGTGITLDLDTSIIYQSPTGLFEREVPLTDL

SEQ ID NO: 725 - protein, 1092 aa, Ilyobacter polytropus
MKYSIGLDIGIASVGWSVINKDKERIEDMGVRIFQKAENPKDGSSLASSRREKRGSRRRNRRKKHRLDRIKNILCESGLVKKNEIEKIYKNAYLKSPWELRAKSLEAKISNKEIAQILLHIAKRRGFKSFRKTDRNADDTGKLLSGIQENKKIMEEKGYLTIGDMVAKDPKFNTHVRNKAGSYLFSFSRKLLEDEVRKIQAKQKELGNTHFTDDVLEKYIEVFNSQRNFDEGPSKPSPYYSEIGQIAKMIGNCTFESSEKRTAKNTWSGERFVFLQKLNNFRIVGLSGKRPLTEEERDIVEKEVYLKKEVRYEKLRKILYLKEEERFGDLNYSKDEKQDKKTEKTKFISLIGNYTIKKLNLSEKLKSEIEEDKSKLDKIIEILTFNKSDKTIESNLKKLELSREDIEILLSEEFSGTLNLSLKAIKKILPYLEKGLSYNEACEKADYDYKNNGIKFKRGELLPVVDKDLIANPVVLRAISQTRKVVNAIIRKYGTPHTIHVEVARDLAKSYDDRQTIIKENKKRELENEKTKKFISEEFGIKNVKGKLLLKYRLYQEQEGRCAYSRKELSLSEVILDESMTDIDHIIPYSRSMDDSYSNKVLVLSGENRKKSNLLPKEYFDRQGRDWDTFVLNVKAMKIHPRKKSNLLKEKFTREDNKDWKSRALNDTRYISRFVANYLENALEYRDDSPKKRVFMIPGQLTAQLRARWRLNKVRENGDLHHALDAAVVAVTDQKAINNISNISRYKELKNCKDVIPSIEYHADEETGEVYFEEVKDTRFPMPWSGFDLELQKRLESENPREEFYNLLSDKRYLGWFNYEEGFIEKLRPVFVSRMPNRGVKGQAHQETIRSSKKISNQIAVSKKPLNSIKLKDLEKMQGRDTDRKLYEALKNRLEEYDDKPEKAFAEPFYKPTNSGKRGPLVRGIKVEEKQNVGVYVNGGQASNGSMVRIDVFRKNGKFYTVPIYVHQTLLKELPNRAINGKPYKDWDLIDGSFEFLYSFYPNDLIEIEFGKSKSIKNDNKLTKTEIPEVNLSEVLGYYRGMDTSTGAATIDTQDGKIQMRIGIKTVKNIKKYQVDVLGNVYKVKREKRQTF

SEQ ID NO: 726 - protein, 1140 aa, Streptococcus parasanguinis
MNGLVLGLDIGIASVGVGILKKDIGEIIHTNSRLFSAATADSNIERRGHRGGKRLTRRKKHRSIRLHDLFEDFGLLTDFSKVSINLNPYQLRVQGLDNQLTNEELFIALKNIVKRRGISYLDDASEDGGTVSSDYGKAVEENRKLLAEQTPGQIQLDRFEKYGQVRGDFNVVENGEKRRLINVFTTSAYSKEAERILRKQQEFNKKITDEFIEDYLTILTGKRKYYHGPGNEKSRTDYGRYTTKKDPEGKYITLDNIFGILIGKCTFYPDEYRASKASYTAQEFNLLNDLNNLTVPTETKKLSEEQKKTIIKYAKTAKTLGASTLLKYIAKLIGASVDQIHGYRIDPNKKPEMHTFETYRKMQSLETISVEELPRKVLDELAHILTLNTEREGIEEAINATLKDTFSQDQVLELVQFRKNNSSLFSKGWHSFSLKLMMELIPELYETSEEQMTILTRLGKQKSKETSKRTKYIDEKELTEEIYNPVVAKSVRQAIKIINEATKKYGIFDNIVIEMARENNEEDAKKEYIKRQKANLDEKNAAMEKAAFQYNGKKELPDNVFHGHKELATKIRLWHQQGEKCLYTGKNIPISDLIQNQYKYEIDHILPLSLSFDDSLSNKVLVLATANQEKGQRTPFQALDSMDDAWSYREFKSYVKDSKLLGNKKKEYLLTEEDISKIEVKQKFIERNLVDTRYSSRVVLNALQDFYKEHQFDTTISVVRGQFTSQLRRKWGLEKSRETYHHHAVDALIIAASSQLRLWKKQNNPLISYTEGQFVDQVTGEIISLSDDEYKELVFKAPYDHFVDTLKSKKFEDSILFSYQVDSKYNRKISDATIYATRKAKLDKENKEYTYTLGKIKDIYALGTKSPSKTGFYKFLDLYNKDKSQFLMFQKDRKTWDEVIEKIIEQYRPFKEYDENGKEVDFNPFEKYRIENGPIRKYSKKGNGPEIKSLKYYDNLLGKFVDITPSESKNPVALLSLNPWRTDVYYNTETSKYEFLGLKYADLCFEKGGAYGISEVKYNKIREKEGIGKESEFKFTLYKNDLILIKDTETNCQQIFRFWSRTGKDNPKSFEKHKIELKPYEKARFEKGEELEVLGKVPPSSNQLQKNMQIENLSIYKVKTDVLGNKHFIKKEGEEPKLKF

SEQ ID NO: 727 - protein, 1334 aa, Enterococcus phoeniculicola
MKKEYTIGLDIGTNSVGWAVLTENYDLVKKKMKVYGNTETKYLKKNLWGVRLFDEGETAADRRLKRTTRRRYSRRRNRICRLQDLFTEEMNQVDANFFHRLQESFLVPDEKEFERHAIFGKMEEEVSYYREFPTIYHLRKHLADTSEQADLRLVYLALAHIVKYRGHFLIEGELNTENSSVSETFRTFIQVYNQIFRENEVPLAVPDNIEELFSEKVSRARKVEAILSVYSEEKSTGTLAQFLKLMVGNQGRFKKTFDLEEDGIIQIPKEEYEEELETLLAIIGDEYAEIFSATKSVYDAVALSGILSVTDGDTKAKLSASMVERYEAHQKDLVQFKQFIRKELPEMYAPIFRDNSVSGYAGYVENSKVVTQAEFYKYIKKAIEKVPGAEYFLEKIEQETFLDKQRTFNNGVIPHQIHLEELEAIIQKQATYYPFLADNKEEMKQLVTFRIPYYVGPLADGNSPFAWLERISSEPIRPGNLAEVVDIKKSATKFIERMTNFDTYLPTEKVLPKHSMIYEKYMVYNELTKVSYVDERGMNQRFSGEEKKQIVEELFKQSRKVTKKLLEKFLSNEFGLVDVAIKGIETSFNAGYGTYHDFLKIGITREQLDKEENSETLEEIVKILTVFEDRKMIREQLKKYTYLFDEEVLKKLERRHYTGWGRLSAKLLIGIKEKRTHKTILDYLIEDDGGKQPINRNLMQLINDSDLSFKSEIAEAQSDMNTEDLHEVVQNLAGSPAIKKGILQSLKIVDELVDIMGSLPKNIVVEMARENQTTSRGRTNSNPRMKALEEAMRNLRSNLLKEYPTDNQALQNDRLYLYYLQNGKDMYTGLDLSLHNLSSYDIDHIVPQSFTTDNSLDNRVLVSSKENRGKKDDVPSKEVVQKNITLWETLKNSNLISQKKYDNLTKGLRGGLTEDDRAHFIKRQLVETRQITKHVARILDQRFNSQKDEEGKTIRAVRVVTLKSSLTSQFRKQFAIHKVREINDYHHGHDAYLNGVVANSLLRVYPQLQPEFVYGDYPKFNAYKANKATAKKQLYTNIMKFFAEDAVIIDENGEILWDKKNIATVKKVMSYPQMNIVKKPEIQTGSFSKETIKPKGDSDKLISRKTNWSPKLYGGFDSPQVAYSVIITYEKGKKKVRAKAIVGITIMEQSLFKKDPVSLLEEKGYANPEVLIHLPKYTLYELENGRRRLLASANEAQKGNQLVLPASLVTLLYHAKQVDEDSGKSEEYVREHRAEFAEILNYVQAFSETKILANKNLQTILKLYEENKEADIKEIAESFVNLMKFSAYGAPMDFKFFGKTIPRSRYTSVGELLSATIINQSITGLYETRRKLVD

SEQ ID NO: 728 - protein, 1504 aa, Bacteroides coprosuis
MKKVLGLDIGTNSVGWAVVNQNDKGEFLSIEKIGSRIIPMSQDVMDKFGAGQTESSTAQRTQYRGVRRLRERSLLRRERLHRVLHILHFLPQHYDAAIGWNKKENKTYGKFLPGVEVNIPWVATDQGHQFIFMDSYAEMLKDLKQHQPHLFEKSSTPVPLDWTIYYLRKKALTQAISKEELAWILLNFNQKRGYYQLRGEEVEDNTKREEFYALKVVKVELDKDNTSAKTWYKVHLENGFIYPCPSDTPIDSWVGMVKDFIVTTTLEKDGSEKRTADGEIKRSFRAPKEDDWTLLKKKTESELEKSGKQVGAFIYDTLLSNPDQKIIGGLIKTIERKYYKKELEQILETQQKFIAELSDKKLFQACAEELYPLNDSHRENLLERDFKHLFVQDIIFYHRPLKTKKSLISNCTYEYRTFYKNGEKQISPIKCIAKSNPLFQEFRVWQFVQNLRILQRQRSEGDSIKYNVDVTAEFLKDENDIANLFTWLNERKVIKQDQLLKSYFKLKVNKETKELDYRWNYVDDKNKEYPCNATRTHILSFLEKCKEEKRIEDDRFVYSLWHLLYSVVEPIELRGALAKFAEREHLHPSFVDVFAQFPPLEKEYGSYSEKAIKRLLPLMRMGDYWHEDKIDVKTKQRIQRIIDGEADDDITHRSREKVENLRSITDFKGLPLWKAGYVVYNRHSESGELTKWKTPHELSNYIQNEFKQYSLRNPIVEQIVLETLRVVHDLWVKHGDFSEIHLELGRDIKNSSDKRKRMAERQQENENSRQRVLEMLIDLKKEAAFADLNPYSPSQQEKLRIVEDGVLRSNIEIPKDIEKITKSAKPTSRELTKYRLWLDQKYRSPYTGQPISLAQLFTSKYEIEHVIPQAKYFDDSFTNKVICESEVNKEKGSMLAHEFILKNGGSTVNVGGRQVQVLKNDAYVELINRLYGKNNPVKAKKLLAEDIDEVVGDFSERQLNDTRYISRVVQKLLSNIVREEDEQESTSKHVIGCSGQVTTALKKDWGLNDIWNKIIQPRFERLNEMTATEDYGVWQSPNHFQIRVPEEIQKGFTKKRIDHRHHAMDALVIACATRSHINYISNRSGQDRNAKFETTRTDLRSKLCYKENSSGNNYNYIFNKPWDTFTQDAHRALENIVVSHKQNLRVLTKTNNYTQFINKDGKKDLQKQVKGDHFAVRKPMHQETIYGRVSIRSIKEVALKKALENWKQIVDRTLKDKIRELIGAYGKYDAQTILKYFKDRDYKFNNLKINRVEVYEYDHNCAAVRKSIGDDLTIKQIERITDESIRKILMNHLSNYDDNLKEAFSPEGLMEMNKNIKELNGGKNHQPIYKVRLFEDLGSKFPLGVSHNNPDKYAIAAKGTNLFFGIYEDQEGKRMFDSIPLNIVIDRLKEKKSPVPETYNESKLKFHLSPNDLVYVPTDEEQKQPELVDVDHLSDEQKGRVYKAVSFTGNRAFFVNHRVSKVIHDYVEFGTKNKIENDDDKRSLKHICWKLKVNRLGEITDVKR

SEQ ID NO: 729 - protein, 1054 aa, Actinobacillus suis
MKLTPLNYILGLDLGIASVGWAVVEIDEQENPLGLIDVGVRTFDRAEVPKTGESLALARRLARSARRLVKRRADRIKKAKRLLKAENILLSADEHLPNDVWQLRVKGLDQKLERQEWAAVLLHLLKHRGYLSQRKNESKSENKELGALLSGVETNHQILQSAEYRTPAEIAVKKFHVEDGHIRNQRGAYTHTFSRLDLLAEMELLFQRQTDLGNPHTSAKLLENLTALLMWQKPALAGEAILKMLGKCTFEPTEYKAAKNSYSAERFVWLTKLNNLRILEQGAERALTDNERFALLDQPYEKAKFTYAQARTMLALPDEAIFKGVRYQGEDKKAVETKTILMEMKAYHQIRKALENADLKAEWNELKNNSELLDDIGTAFSLHKTDEDICRYLDGKLSESILNALLENLNFDKFIQLSLKALQQILPLMLQGQRYDEAVSAIYGDHYGKKSAEINRLLPTIPADEIRNPVVLRTLTQARKVINAVVRLYGSPARIHIETGREVGKSYQDRKKLEKQQEDNRKQRESAVKKFKEYFPNFVGEPKGKDILKMRLYELQQAKCLYSGKSLELHRLLEKGYVEVDHALPFSRTWDDSFNNKVLVLANENQNKGNLTPYEWLDGKNNSEHWQNFVARVQTSGFSHTKKQRILSHKLDEKGFIERNLNDTRYVARFLCNFIADNMLLTGKGKRKVFASNGQITALLRGRWGLQKVRDDNDRHHALDAVVVACSTVVMQQKITRFVRYEEGNVFSGERIDRETGEIIPLHFPSPWAFFRENVEIRIFSENPKLELENRLPDYPQYNHEFVQPLFVSRMPTRKMTGQGHMETVKSAKRLDEGLSVLKVPLTQLKLSDLERMVNREREVTLYESLKARLEQFGNDPAKAFAEPFHKKGGAVVKAVRVEQTQKSGVLVRDGNGVADNASMVRVDVFTKGGKYFLVPIYTWQVAKGILPNKAVTANVDEIDWLEMDESYQFIFTMYPNDLVKVKLKKEEFFGYYGGLDRATGAIVIKEHDLEKSKGKQGIYRIGVKLALSFEKYQVDELGKNIRPCRPTKRQHVR

SEQ ID NO: 730 - protein, 1110 aa, unidentified
  source 1..1110: note = Candidatus Micropelagos thuwalensis
MSEKYRLGLDVGTNSLGWAVIGLKEDVPSSVLATGVRIFSEGRDAKTKSTLKASRTEKRSARRRRDRFLQRQTFLISEMVKSGLFPKDIVEQKNLELLDPYEIRFKALTEQVPLHHLGRALFHINQRRGFKSSRKDKSEETTSGVVSKSVRALYEEMQLINPAPVIDDPKALSKEERREIRVQEASSREEALVTLAEQKGVTFGAFLYRRLQSGKSVRARKDADSQLYDVYPTRELLKDEYSKLMQHQAQYYPNVINEALISRLHDVIFFQRKLKEQERGFCTYYPSERRTFRCMPSFQQYRMVQELNALEWVDAAGKHCLRDYPESRDLILSELENISTKAGEFTFGNMKKILKKMGVIDGEVSFNFEGPKRKGFQGNVTSREMRHEDCFGTRWDELSLDEKDDIIDKINDDHLDDEDMERYLIDTYGLSSFSVGNAINARLLEGTANVSRKAARTLYETMLSANCLQSDAVIAVSEQDDTFVNPYSRTGRGELLSELPYYGEAFQDGRHIIPGKREPKVSHDQLKFYGGVSNPTVHIALNQIRLVVNEIIKRYGLPSSISIELARNLPEGQDGRRKIEKMQSENQKNNERYDQILTENGQSPNRDNRLRLALWEELGEGPTDRLCVFTGKLIELADLFNGSVEIEHLIPFSVSLDDSKANKTVCWKEANRFKGNKTPYEAFANNSGDYSWEEIMERVRALPNSKQWRFQEDALKIWNSDHSDFSGRHLNDTRYISRLAREYLENICPFNKIDVVTGRLTALLRGHWGLNNILRGHNEPETATPKKMRDDHRHHAIDAVVIAMTSLTILQKVSSAAGKAEELDVGKLFAKDESGRSVIDPWDGFRDEVAEKVRNIIVSHKTKRKTIGNSGKSTDRALHNETAYGLIDGPDEKGLYSVVTTKPISYFDNRDKIEKIRDEKLRDDFLTAWDGEGDNKASQLAVLDKASGLNVKKCRYVERKKVIPINGPDGQPYKAYDGNSNWGMEIYEFPNGHPKEKKWNGVVISTYDANKSEFKPGETFRPHPAAKLVMRLHINDIVEVQNDGEPILYRVQLISAGTLTVSPLHEANVDSRNRDKHDEFKYKSLSVTPMQKMGAKKVNISPTGLKNYSR

SEQ ID NO: 731 - protein, 1415 aa, Streptococcus oralis
MAKFNKPYSIGLDIGVSSVGYAVITEDYRVPAFRFKVLGNTEKEKIKKNLIGSTTFVPAQSAQVTRVFRVNRRRIDRRNHRIAYLRDIFQKEIEKVDKNFYRRLDESFRVLGDKSEDLQIKQPFFGDKELETAYHKKYPTIYHLRKHLADADKNSPVADIREVYMALSHILKYRGHFLTLDKINPNNINMQNSWINFIESCQEVFDLEVSEESKTIAAIFKSSENRQEKVKQILSYFQQELLKKDKSIFKQLLQLLFGLKTKFKDCFELEEEPDLNFSKENYDENLENLLGTLEEDFSDVFAKLKILRDTILLSDMLTYTGATHARFSATMVERYEEHRKDLQRFKSFVKQNLSEQDYLDIFGRKTPNGFDVDKETKGYVGYISNKMVLTNKQKTIQQNFYDYISGKITGIEGAEYFLNKISDGTFLRKLRTTDNGAIPNQIHAYELEKIIERQGRDYPFLLENKDKLLSILTFKIPYYVGPLAKGNNSRFAWIKRATSQDILDDNDEDTRNGKIRPWNYHKLINMDKTRDAFITNLIGNDIILLNEKVLPKRSLIYEEVMLQNELTRVKYKDKYGKTHFFDSELRQEIINNLFKTNSKRVSSAMLLNYLENYTNLQAVEIVSGIEKGKSLNSTLKTYNDLKTIFSEELLDSEIYQKELEEIVKVITVFDDKKSIKNYLTKYFGRLEFLNEERINQLSKLRYTGWGRYSAKLLLDIRDEDTGFNLMQFLRNDDENRNLSQLISDSTLSFDSAIKSIQSKSTVEDDVFDEIKKLAGSPAIKRGILNSIKIVDELVQIIGYPPQNIVIEMARENMTTEEGQKKAKTRKTKLESALKNIENSVLENGKVPHSDEQLQSEKLYLYYLQNGKDMYSLDKTGSPTPLYRDRLDQYEVDHIIPYSFLPIDSIDNKVLTHRENNQRKLNNIPDKETVANMKPFWEKLYNAKLISQTKYQRLTTSERTPDGVLTESMKAGFIERQLVETRQIIKHVARILDNRFLDTKIITLKSQLITNFRNTFHIAKIRELNDYHHAHDAYLAVVIGQTLLKAYPKLAPELIYGHHAHFNRHEENKATIRKHLYSNIMRFFNNPNSKVSKDIWNCNRDLPIIKDIIYNSQVNFVKRTMIKKGAFYKQNIIPNDSSVTVDKRFPIKNKKYLDPKLYGGYYERNSALSVFIIGQSFNKNNKLKVVKEFYDINIIDYPLFNTDPMSFFNDDSENGFLTKNNLQSVQAFYKIPKYSLIQKNDGTRMLFESTTNFHKATQFKLTEAQNELFFHMKRLLTKTDFMDLKSEESIKESQDFIMNHKNEFDNIVNGLFGYAERQLGSKSLFTQAHEAYKLRKYPVFSLNEETIRYYYDNFLRLFSLTKSGTSSGYVVGLFEAPKLRNVVYRATKDESNATLIHQSITGLYETRIDLSKLGED

SEQ ID NO: 732 - protein, 851 aa, Streptococcus sp.
MTNGKILGLDIGVASVGVGIIEAKTGKVIHANSRLFSAANAENNAERRGFRGARRLTRRKKHRVKRVRDLFEKYDILTDFRNLNLNPYELRVKGLTEQLTNEELFAALRTIAKRRGISYLDDAEDDSTGSSDYAKSIDENRRLLKSMTPGQIQLERLEKYGQLRGNFTVYDENGEAHRLINVFSTSDYKNEARKILETQSNYNKQITDEFIEDYIEILTQKRKYYHGPGNEKSRTDYGRFRTDGTTLENIFGILIGKCSFYPEEYRASKASYTAQEFNFLNDLNNLKVPTETGKLSTEQKEYLVNFAKNSKTLGASKLLKEIAKLVDGDVKDISGYREDSKGKPDLHTFEPYRKLKFNLTTVDIDNLSRDILDKLADILTLNTEREGIEDAINQNLPEQFTKEQISEIVQIRKSQSSAFNKGWHSFSAKLMNELIPELYATSEEQMTILTRLEKFKATKKSSKNTKTIDEKEITDEIYNPVVAKSVRQTIKIINAAVKKYGDFDKIVIEMPRDKNADDEKKFIDKKNKENKKEKDDSLKRAAYLYNGTDKLPDDVFHGNKQLATKIRLWYQQGERCLYSGKPILIQDLVHNSNNFEIDHILPLSLSFDDSLANKVLVYAWANQEKEQKTPYQVIDSMDAAWSFREMKDYVLKQKGIGKKKREYLLTTENIDKIEVKKKFIERNLVDTRYASRVVLNSLQTALKELGKDTKVSVVRGQFTSQLRRKWKIDKSRETYHHHAVDALIIAASSQLKLWQKHENLMFENYGENQVVNKETGEILSISDDEYKESVFQPPYQGFVNTISSKAFEDEILFSYQVDSKFNRKVSDATIYSTRKAKLGKDKKEETYVLGK

SEQ ID NO: 733 - protein, 1388 aa, Zunongwangia profunda
MKRILGLDLGTNSIGWALVNEAENEKEISKIIKLGVRVNPLTIDEKTNFEKGRPLSTNADRTLKRGARRNLQRYKLRRENLIEILIDNHIITKETPLTEIGKGTTYQTLSLRAKAVRERIDLEDFAKVLLAINKKRGYKSSRKASNDEEGQAIDGMAIAKELYERGITPGQYVLELLENDRKYIPDFYRSDLKQEFNKIWNNQKTFYPEILTDELFKELDGKNKSQTWAICQKPFNIKGIKRITKGREKTIENYHWRVKGLSGKLNLEKLAIILQEINNDINQSSGYLGGISDKSKKLYLNKETVGEFLYKQIAKNPHTSLKNQVFYRHDYLDEFEQIWKTQSNFNANLTDELKQEIRDVIIFYQRKIKSQKSLISFCQFESWEQEYFDKETGKTKTRTVGRRVIPKSSPLFQEFKIWQNLNHLVFTNSETDEKIEIKEVEQEIRKELFEELNLRGDLNPNDLLKILRSQFKIGKLSNWKCNFEKIEGNRTNAALFNIYQKISDFEGYGIDWNKSNAKKIRKELKATFPEIGIDASILEFDAYKKQLTNQSSYELWHLLYSAEEDFKISEQDKLIYGNSSVSLKKKLHLKFGFNPEYAKMLANLSLMSDYGNLSAKAIKKILPYLEDGHLYSEACRLAGYNHSKSLTAEELEKFEPKAKLDLLKKNSLRNPVVEKILNQMVNVVNQVIDTYGKPDGVRIELARELKKSAKERAEMTKGIADGTRRNEEIKKIITQKFGIPNPTKSDLVRYRLWQELESRGYKDIFTDKYISPDKIFSSEIDIEHIIPKALLFDDSFSNKTLSFRNVNLKKANRTALDFITQDYQSNVEAYKERVETWNKDNHISKGKRNKLLMSLKDIPDGFIERDLRNSQYIARKAKRMLYEVFPNEVLATSGSITDKLRSDWDLINVMKELNLPKYKALGLTEYEERLDKGTEELFKHEVIKDWTKRNDHRHHAMDALAVAFTTHNHIQYINNLNARKDITQDNHPIIKNIENLITEVNSKGKRVFKAPMSSFRESAKEQIEAILVSFKNKNKVVTKNINQTKKEGGFNYQNAKTPRGQLHKETIYGKSKQPLEKPVKINNRFCKKQVGLIINFKEQEAVLHHLKKYDNNEKIAFSNKTLKSDPIQVNGSPLREVKIFEEIFTIRKDINPDNFKTQKHLDKIIDKGIKEVMKKRLEEYNGDFKTAFSDLDKNPIWLNQSKGITIKRATISGVTNAEPLHQAKDHLGNIILDDNGKEIPIDYVSTGNNHHVAIYQDESGNLQEEVVSFYEAVIRKNQDQPIIKKRHPKGWKFLFTMKQNEMFVFSSENFNPSEIDLLDEKNAAIISPNLFRVQKIATKNYMFRHHLETEVTNNLDFTYRHFQATEWLRNLCKVRIDHIGRIVQIGEY

SEQ ID NO: 734 - protein, 1509 aa, Psychroflexus torquis
MKRILGLDLGTNSIGWSLIEHDFKNKQGQIEGLGVRIIPMSQEILGKFDAGQSISQTADRTKYRGVRRLYQRDNLRRERLHRVLKILDFLPKHYSESIDFQDKVGQFKPKQEVKLNYRKNEKNKHEFVFMNSFIEMVSEFKNAQPELFYNKGNGEETKIPYDWTLYYLRKKALTQQITKEELAWLILNFNQKRGYYQLRGEDIDEDKNKKYMQLKVNNLIDSGAKVKGKVLYNVIFDNGWKYEKQIVNKDEWEGRTKEFIITTKTLKNGNIKRTYKAVDSEIDWAAIKAKTEQDINKANKTVGEYIYESLLDNPSQKIRGKLVKTIERKFYKEEFEKLLSKQIELQPELFNESLYKACIKELYPRNENHQSNNKKQGFEYLFTEDIIFYQRPLKSQKSNISGCQFEHKIYKQKNKKTGKLELIKEPIKTISRSHPLFQEFRIWQWLQNLKIYNKEKIENGKLEDVTTQLLPNNEAYVTLFDFLNTKKELEQKQFIEYFVKKKLIDKKEKEHFRWNFVEDKKYPFSETRAQFLSRLAKVKGIKNTEDFLNKNTQVGSKENSPFIKRIEQLWHIIYSVSDLKEYEKALEKFAEKHNLEKDSFLKNFKKFPPFVSDYASYSKKAISKLLPIMRMGKYWSESAVPTQVKERSLSIMERVKVLPLKEGYSDKDLADLLSRVSDDDIPKQLIKSFISFKDKNPLKGLNTYQANYLVYGRHSETGDIQHWKTPEDIDRYLNNFKQHSLRNPIVEQVVMETLRVVRDIWEHYGNNEKDFFKEIHVELGREMKSPAGKREKLSQRNTENENTNHRIREVLKELMNDASVEGGVRDYSPSQQEILKLYEEGIYQNPNTNYLKVDEDEILKIRKKNNPTQKEIQRYKLWLEQGYISPYTGKIIPLTKLFTHEYQIEHIIPQSRYYDNSLGNKIICESEVNEDKDNKTAYEYLKVEKGSIVFGHKLLNLDEYEAHVNKYFKKNKTKLKNLLSEDIPEGFINRQLNDSRYISKLVKGLLSNIVRENGEQEATSKNLIPVTGVVTSKLKQDWGLNDKWNEIIAPRFKRLNKLTNSNDFGFWDNDINAFRIQVPDSLIKGFSKKRIDHRHHALDALVVACTSRNHTHYLSALNAENKNYSLRDKLVIKNENGDYTKTFQIPWQGFTIEAKNNLEKTVVSFKKNLRVINKTNNKFWSYKDENGNLNLGKDGKPKKKLRKQTKGYNWAIRKPLHKETVSGIYNINAPKNKIATSVRTLLTEIKNEKHLAKITDLRIRETILPNHLKHYLNNKGEANFSEAFSQGGIEDLNKKITTLNEGKKHQPIYRVKIFEVGSKFSISEDENSAKSKKYVEAAKGTNLFFAIYLDEENKKRNYETIPLNEVITHQKQVAGFPKSERLSVQPDSQKGTFLFTLSPNDLVYVPNNEELENRDLFNLGNLNVEQISRIYKFTDSSDKTCNFIPFQVSKLIFNLKKKEQKKLDVDFIIQNEFGLGSPQSKNQKSIDDVMIKEKCIKLKIDRLGNISKA

SEQ ID NO: 735 - protein, 1336 aa, Enterococcus hirae
MTKDYTIGLDIGTNSVGWAVLTDDYQLMKRKMSVHGNTEKKKIKKNFWGARLFDEGQTAEFRRTKRTNRRRLARRKYRLSKLQDLFAEELCKQDDCFFVRLEESFLVPEEKQYKPASIFPTLEEEKEYYQKYPTIYHLRQKLVDSTEKEDLRLVYLALAHLLKYRGHFLFEGDLDTENTSIEESFRVFLEQYGKQSDQPLIVHQPVLTILTDKLSKTKKVEEILKYYPTEKINSFFAQCLKLIVGNQANFKRIFDLEAEVKLQFSKETYEEDLESLLEKIGDEYLDIFLQAKKVHDAILLSEIISSTVKHTQAKLSSGMVERYERHKADLAKFKQFVKENVPQKATVFFKDTTKNGYAGYIKGKTTQEEFYKFVKKELSGVVGSEPFLEKIDQETFLLKQRTYTNGVIPHQVHLIELKAIIDQQKQHYPFLEEAGPKIIALFKFRIPYYVGPLAKEQEASSFAWIERKTAEKINPWNFSEVVDIEKSAMRFIQRMTKQDTYLPTEKVLPKNSLLYQKYMIFNELTKVSYKDERGVKQYFSGDEKQQIFKQLFQKERGKITVKKLQNFLYTHYHIENAQIFGIEKAFNASYSTYHDFMKLAKTNQKAMQEWLEQPEMEPIFEDIVKILTIFEDRQMIKHQLSKYQEVFGEKLLKEFARKHYTGWGRFSAKLIHGIRDRKTNKTILDYLINDDDVPANRNRNLMQLINDEHLSFKEEIAKATVFSKHKSLVDVIQDLPGSPAIKKGIWQSLKIVEELIAIIGYKPKNIVIEMARENQKTHRTKPRLKALENGLKQIGSTLLKEQPTDNKALQKERLYLYYLQNGRDMYTGEPLEIENLHQYEVDHIIPRSFIVDNSIDNKVLVASKQNQKKRDDVPNKQIVNEQRIFWNQLKEAKLISPKKYAYLTKIELTPEDKARFIQRQLVETRQITKHVANILHQSFNQEEEGTDCDGVQIITLKATLTSQFRQTFGLYKVREINPHHHAHDAYLNGFIANVLLKRYPKLAPEFVYGKYVKYSLARENKATAKKEFYSNILKFLESDEPFCDENGEIYWEKSHHLPRIKKVLSSHQVNVVKKVEQQKGGFYKETVNSKEKPDKLIERKNNWDVTKYGGFGSPVIAYAIAFVYAKGKTQKKTRAIEGITIMEQAAFEKDPTTFLKDKGFPHVTEFIKLPKYTLFEFDNGRRRFLASHKESQKGNPFILSDQLVTLLYHAQHYDKITYQESFDYVNTHLSDFSAILTEVLAFAEKYTLADKNIERIQELYEENKYGEISMIAQSFLQLLQFNAIGAPADFKFFGVTIPRKRYTSLTEIWDATIIYQSVTGLYETRIRMGDLWAGEQ

SEQ ID NO: 736 - protein, 1512 aa, Fibrobacter succinogenes
MKKILGLDLGTNSIGWAVVNADEITRDDGSRYLKPNGISAAGSRIIPMSADILGDFEKGNSISQTAERTRMRMARRLHERALLRRERLLRVLNLLDFLPKHFADKIDRYGKFTDDSEPKLAWRKNTEGKYEFIFQDAFNEMLAEFKDKQPEIVEEGKKIPYDWTIYYLRKKALEKALSKEELSWILLQFNQKRGYYQLRGEEEEIPQDKKIEYLAQKVVKVEATDQKKGDDVWYNVYLENGMIYRRTSKAPLDWEGKVKEFIVTTEVENDGETPKKDKEGNIKRSFRAPKEDDWTLLKKKTEADIENSHKTVGCYIYDSLLNNPKQKIIGKLVRTVERKFYKEELTQILKKQVELIPELRDDNLYKQCIEELYPINEAHRNTIAKTDFANLFINDILFYQRPLKSKKSQIDNCPYEERIFIDSKTGEKKKVPVKCIAKSNPLFQEFRLWQFIQNLRIYQREKEIDGKLLTDIDITSECLKSEEDYVRLFDWLNDRETIEQEDLLKHLFNTKKSKNKENPYRWNYVEDKVYPCNETRATILKGFSKCGINASVLSPELEMALWHILYSVEDKKEIETALTHFAQKQGWNDDFAKVFSKAKPFKKDYGSYSEKAIKKLLSLMRMGKYWNQDNIDKNTLDRIDKIINGEYDEKISNRVRDNAINLKDISDFRGLPVWLACYIVYDRHSEAKDCTKWNSPEEIDSYLKKFKQHSLRNPIVEQVVTETLRTVRDIWIQEEQIDEIHLELGRDLKNPADKRKKMSENILKNENTNLRIKAMLMEFMNPSMGIENVRPYSPSQQDILRIYEENALDNLTKDDKDFDFISKISKQAQPSKTDIIRYKCWLEQKYRSPYTGKTISLSKLFTPAYEIEHVIPQSLYFDDSFSNKVICEAEVNKLKDRQLGYKFIAEHHGEKVQLSQGEVVEILSVDAYEKFVKENYANNRIKMKKLLMESIPDEFIERQLNDSRYISKVVKGLLSNIVREKIDDENYEPEAVSKNLISCNGAITDRLKKDWGMNDVWNSIILPRFIRMNQITGKDCFTTTNAEGHLIPQMPLELQKGFNKKRIDHRHHAMDAIVIACTTRDHVNLLNNEAAHSKFNATRYQLQRKLRRFEKAVIDGKEREVAKEFLKPWDSFSSDSKNILENIIVSFKQNQRVINKTTNAFLHFDENGKKTFIKQGKGDSWAIRKSMHKDTVFGEINLRKVRSVSLNEAIKVPERVLNKKIKEKILELKNNKIDAKNIKKYIEENHTGGYGIDSSKIDVFYFTKETKERFFATRKTLDTSFNQAKIKDSIADSGIQKILLAHLKSKNGDAEQAFSPDGIDEMNKNIVELNNGKFHQPILKVRVYEKADKFAVGQKGNKKVKFVEAAKGTNLFFAIFEKDGKRSYLTIPLNVMIDCQKQYGNQWKNNIEAYLKEKELVEKDVKLQFILSPNDLVYLPTEGSIDKKRIYKVVSFTNNRLYAIPYAIAKSIVDKNEFTQLNKIEFTDNKESIKDACVPVIIDRLGNVIEFNGKRL

SEQ ID NO: 737 - protein, 1362 aa, Lactobacillus farciminis
MKLGDIMTKKEQPYNIGLDIGTGSVGWAVTNDNYDLLNIKKKNLWGVRLFEGAQTAKETRLNRSTRRRYRRRKNRINWLNEIFSEELANTDPSFLIRLQNSWVSKKDPDRKRDKYNLFIDNPYTDKEYYREFPTIFHLRKELIINKNKADIRLVYLALHNILKYRGNFTYEHQKFNISTLNSNLSKELIELNQQLIKYDISFPDNCDWNHISDILIGRGNATQKSSNILNNFTLDKETKKLLKEVINLILGNVAHLNTIFKTSLTKDEEKLSFSGKDIESKLDDLDSILDDDQFTVLDTANRIYSTITLNEILNGESYFSMAKVNQYENHAIDLCKLRDMWHTTKNEKAVGLSRQAYDDYINKPKYGTKELYTSLKKFLKVALPTNLAKEAEEKISKGTYLVKPRNSENGVVPYQLNKIEMEKIIDNQSQYYPFLKENKEKLLSILSFRIPYYVGPLQSSEKNPFAWMERKSNGHARPWNFDEIVDREKSSNKFIRRMTVTDSYLVGEPVLPKNSLIYQRYEVLNELNNIRITENLKTNPTGSRLTVETKQHIYNELFKNYKKITVKKLTKWLIAQGYYKNPILIGLSQKDEFNSTLTTYLDMKKIFGSSFMENNKNYNQIEELIEWLTIFEDKQILNEKLHSSNYSYTSDQIKKISNMRYKGWGRLSKKILTCITTETNTPKSLQLSNYSVLDLMWTTNNNFISIISNDKYDFKNYIENHNLNKNEDQNISNLVNDIHVSPALKRGITQSIKIVQEIVKFMGHAPKYIFIEVTRETKKSEITTSRGKRIQRLQSKLLNKANGFKPQLRKYLVPNEKIQEELKKHKNDLSSERIMLYFLQNGKSLYSEESLNINKLSDYQVDHILPRTYIPDDSLENKALVLAKENQRKADDLLLNSNVIDKNLERWTYMLNNNMMGLKKFKNLTRRVITDKDKLGFIHRQLVQTSQMVKGVANILNSMYKNQGTTCIQARANLSTAFRKALSDQDDRYHFKHPELVKNRNINDFHHAQDAYLASFLGTYRLRRFPTDEMLLMNGEYNKFYGQVKELYSKKKKLPDSRKNGFIISPLVNGTTQYDRNTGEIIWNVGFRDKILKIFNYHQCNVTRKTEIKTGQFYDQTIYSPKNPKYKKLIAQKKDMDPNIYGGFSGDNKSSITIVKIDNNKIKPVAIPIRLINDLKDKKTLQNWLEENVKHKKSIQIIKNNVPIGQIIYSKKVGLLSLNSDREIANRQQLILPPEHSALLRILQIPDEDPDQILAFYDKNILVEILQELITKMKKFYPFYKNEQEFLASNIENFNQATTSEKINSLEELITLLHANSTSAHLIFNNIEKKAFGRKTHGLTLNDTDFIYQSVTGLYETRIHIE

SEQ ID NO: 738 - protein, 1216 aa, Prevotella stercorea
MTKILGIDTGTNSLGWAIVDKTADNYNLLDKGVNIFQEGVKIEKGIESSKAAERTEHRATRVRYYRIKLRKIRLLRILSDNHLCPPLSQEELSTWRLKKVYPKNELFMQWQRTDDDTEKTPYAYRHKCIHEKLDLSDVTDRYILGRAFYHIIQRRGFLSNRKEQGGEDSGKVKEGISTLTHEMNEAGYEYLGDYFYALYNKGEKIRKHYTARNEHFLSEFKAICEKQDLEKELGSEVVRNIEKAIFDQRPLKSQKGQVGKCVFEKNKTKCPSSHPMYEEFRMLTFINNIKIKTPNDDVLRPLNTGEREKIMPLFFRKSKKQFDFEDITKKLAPKKMYGFYKKEEDAEMPFLFNYPMDTSVSGCPVTAALKDVFGDDWITAICETYTLGEGKSRFDIVNDIWHALYFYSDKDKLAEFAINRLQLSEDEAKIFSEISLPADYASLSLKAICKILPYLRRGLIYSHAVFLGNLCEVMPKYEWSIKEMRETIIDNIIMEMDKCDTKDKRTFEVCIKDYLKGQYNVSDNSLKKLYHPSMIETYPRVQYTNEHGVYQLGSPRIDSVRNPMAMRSMFRLRKLVNRLLVEGKIDQNTEVHIEFARELNDANKRNAIALFVKENQSANDEARKQIITLFKKETGTDIEPTDKDILKYVLWEEQNHICLYTGKQIRISDFIGANPKFDIEHTIPRSVGGDSTKMNLTLCDSRFNREVKKTKLPVELPNHDEIMERIKEWKKNYELLDIQIRKNKKLSKGATTKEQKDTIIRKRHLLELRRDYWRGKYERFTMESVPEGFSRRQGTDISVISKYARLYLKSLFNRVYTVKGIATSDFRKIWGIQDIYSKKERINHVHHCIDAIVIACIGLDEYNKLGAYYHDEENNKWYGMSKASFKKPWATFVEDIKKIQDEILVYHYTPDNMPKQGRRRIKIDGKKILCKGDAARGSLHNDTYYGAIENDGAVKYVKRIDLASLEEKDVKNIVDDTVRSIIEAAIKEKGFKDAMASTIWMNEEKRVPIKKVRCFTPSITKPLNIRKQRDVSIKEYKQQYHVANDSNYLLALYIGTDNKGKEKREFEIVNILQAAQYYRTSNDKEVVDRHIVPIKSEHDYPFAYTLKIGTMVLLYEKSPNEVWDATIKERNRRLYKVTGLSTMRMKGRNGEYAYATVKLIHNEEARPSKDIKAKNGEYEQGEEFRPAIIMLHTQLNALVQGYDFEINELGEIRRLR

SEQ ID NO: 739 - protein, 1181 aa, Actinomyces sp.
MLHCIAVIRVPPSEEPGFFETHADSCALCHHGCMTYAANDKAIRYRVGIDVGLRSIGFCAVEVDDEDHPIRILNSVVHVHDAGTGGPGETESLRKRSGVAARARRRGRAEKQRLKKLDVLLEELGWGVSSNELLDSHAPWHIRKRLVSEYIEDETERRQCLSVAMAHIARHRGWRNSFSKVDTLLLEQAPSDRMQGLKERVEDRTGLQFSEEVTQGELVATLLEHDGDVTIRGFVRKGGKATKVHGVLEGKYMQSDLVAELRQICRTQRVSETTFEKLVLSIFHSKEPAPSAARQRERVGLDELQLALDPAAKQPRAERAHPAFQKFKVVATLANMRIREQSAGERSLTSEELNRVARYLLNHTESESPTWDDVARKLEVPRHRLRGSSRASLETGGGLTYPPVDDTTVRVMSAEVDWLADWWDCANDESRGHMIDAISNGCGSEPDDVEDEEVNELISSATAEDMLKLELLAKKLPSGRVAYSLKTLREVTAAILETGDDLSQAITRLYGVDPGWVPTPAPIEAPVGNPSVDRVLKQVARWLKFASKRWGVPQTVNIEHTREGLKSASLLEEERERWERFEARREIRQKEMYKRLGISGPFRRSDQVRYEILDLQDCACLYCGNEINFQTFEVDHIIPRVDASSDSRRTNLAAVCHSCNSAKGGLAFGQWVKRGDCPSGVSLENAIKRVRSWSKDRLGLTEKAMGKRKSEVISRLKTEMPYEEFDGRSMESVAWMAIELKKRIEGYFNSDRPEGCAAVQVNAYSGRLTACARRAAHVDKRVRLIRLKGDDGHHKNRFDRRNHAMDALVIALMTPAIARTIAVREDRREAQQLTRAFESWKNFLGSEERMQDRWESWIGDVEYACDRLNELIDADKIPVTENLRLRNSGKLHADQPESLKKARRGSKRPRPQRYVLGDALPADVINRVTDPGLWTALVRAPGFDSQLGLPADLNRGLKLRGKRISADFPIDYFPTDSPALAVQGGYVGLEFHHARLYRIIGPKEKVKYALLRVCAIDLCGIDCDDLFEVELKPSSISMRTADAKLKEAMGNGSAKQIGWLVLGDEIQIDPTKFPKQSIGKFLKECGPVSSWRVSALDTPSKITLKPRLLSNEPLLKTSRVGGHESDLVVAECVEKIMKKTGWVVEINALCQSGLIRVIRRNALGEVRTSPKSGLPISLNLR

SEQ ID NO: 740 - protein, 1070 aa, Sphingobium baderi
MATRLGLDIGTNSIGWCLYDGDSIRDIGVRIFLDGREPSKLTVSGSGTPLAVKRRDARGARRRRDRYIGRRSAMLRELRKHGLLPADPKQAKVLETQDPYALRVRALDEKLEPHQIGRALFHLNQRRGFKSNRKAERASKAGEDGKIATATKLLDEEMQRLGARTLGEFLVKRDSEFDGEAGKRVRMRADSKAYDFYPDRRHVLDEFRAIWNAQKVWHPELLTEQAWNDIFRVIEYQRELKPQVVGHCTFAGINGVPADEKRLPKAHPLFQQRRLYEEVNQLKVVAPGEAGRPLTRDERDALILKLQDKKSVSFETLGKTLKLKDGERFNKESENRKALDGDEVRAALSGKKLFGTRWFHFSAEEQWMIIERLLEEEDSETLLTWLKIGYRLDDEAALAVANAKLPEGHGRFGLSATTALLKELKADVCTYAEAAKRAGFHHSDFRTGEVFDQLPYYGEILAREIAPGKPEYGDENERRFGKITNPTVHIGLNQLTKLVNAIIRLHGKPDYIFVELARELKLNEKEKIAYNRQLKENTDAARDRGAKLGTMGVRDTGRNRLILRLWTELNPGDALNRRCPFCGEQISQRMIQNGEVEIEHIIPYSQCFDDGIGNKVLSHVRCNRQKGDQTPWERWGHDPDRWSIIQEQVAHLHRSKQWRFGPDARDRYAAEEDSFLPRQLIDTQYLTRIAAKYLACLYPERGERHVFAVHGGMTAMLRRLWDLNSILLDHNWVENLNSNAPKNRLDHRHHAIDAAVVGIMTPGLIAEIAKAAARAEKQNLDRLFEELPMPWAQHPNDRRFRDELREKILAATVSHKADHGRQGKPERGRDITAGKLHNDTAYGFTGLTSDTGLPVVVHRVPLTSLTPKDIADPDRIPDTTLRGSLWQATRDLSGKEFEKALLDFSRTHAQFKGIRRVRVREGLTLIPIRNHAGKPYKGYLGDSNARYNVWQMPDGRWVHQVISTFDLHQPGFIEQRPHPAAKKVLSLRQNDLIAIERDGALRQIMRVQKYGQNGQIFLIEHNEAGNMAERNKNTDDPFKFYGPGASALRNMKARQVRIDELGRIFDPGPR

SEQ ID NO: 741 - protein, 1121 aa, Enterococcus dispar
MDRTEVNIGFDIGISSVGWSVVATKSGRILESGVSLFSGASAAKNEERRNFRQSRRLLRRRKNRISDLKKYLKEQSFTYNGELLNENPYEIRVKGLTEKLSKEEIALALLHIVKRRGVSYDLGDIEEEGTTGSYKEGVKKNQKLLKEKTPAEIQFQRLKKFHKVRGQIAIDENDVLLNVFPNHAYVDEAQQILYTQQEFYPEINETFINQVTDFISRKRDYFIGPGSEKSRTDYGIYRTDGTTLQNLFSILIGKDKIFPDEFRAAGNSYTAQVYNLLNDLNNLAIDDTETGKLTKQQKEKIIMELKTTEKSVNMMKLIAKTAGVTVEQISRYRINRDGKSEIHNMAVYRKIRKVFLELGYEINEWPSQLLDELGDALSLNTENGEIRRILTDNLANKYKILDQQLINLIIENKNAFTLSTNQKWHRFSYKTMKILIPELLETNKEQMTILTEMGLMKKDQRNYVGKNKIDSEALLENLYNPVVRKSTRQTMKLFNTLLKKYPNIAYVVIEMPREDDEDKARRDYVKFQKDNEKEKDAALKNFIMESGKSEAEVIAKYRQSKKFRSKVRLWYQQMGRCLYSGKAMPAERVFRDDHFTDIDHVIPLSVSFDDGMNNKVLCLAEMNRQKDKQTPYAFFNAGHGQGFQAMNAMLKNNNRISSAKKRNLLFTENLNDLEVRKRFIERNLVDTRYASRVVLNELQQFVKAKQLDTKVTVIRGKFTSKLREKWNINKSRDTHHHHAVDAAVIAVSPMLNLWEKGASIIPNKVGENVIDIKTGEIITDHDYEADVYELPYAKFLEQIPKVKKDIKFRHQVDKKKNRKVSDATIYTTRKAKVGKDKEETDYVLGTIKDIYSLEGYVSFKKIYNKDKAKFLMARIDPKTFEKLEKIVAEYPESIEVVQDNGKVDVQKISPFELYRKDNGFVTKFAKKNNGPAVKSLKYYDSKLGSSIDVTPDNAKNKKVILQSLKPWRTDVYFNEENQEYEIMGLKYSDLKFGKNGKYGVPKVRYEEIKQEEEISEGSKFLFSLYRGDRIKVTNELGENLDLLFSSRTLPAQKGYVELKPIDKTKFDGKEKVSFYGTVTPNGQFVKKFAKKGYKILKLNTDELGNTYIENGEKEPSDILDM

SEQ ID NO: 742 - protein, 1170 aa, Scardovia inopinata
MAKKKISYRIGIDVGLNSTGLAAIEVDDDGAPIRILNTMSVIHDGGVDPDAAKVRGTRLAISGIARRTRRMRRRRAKRLDRLEQILEKYGYTDTEPVLEEPYGPWICRAELADGFINDDEQRRMMIGIAIRHIARHRGWRNPYQNVRALLNIDDSDLSEEYKNLKEKVQDQINDGKDLPNFTPSQLVRDYLDNFSGQPAARIRTGKAGPRGNRRDAVGILPQRMRQSDYAYELQRIFDMQKIGRDEAQELLMAVFEAKSPKGSAEKRIGKDPLTGKKRALKASLAFQKYRIVATITNLRIKTGTGSERMLSPTELNDIYTYLLRVQDDNHLPTWEDICEEVLHIGRYQLAGIGKTFEGGERISNMPPVIQTSLAIHGLSEGTLAEKLTKWWDKADDDSRESMIKLLSNTVDIDRVNEVDENFASALDFIDSLDDEELTKLDKIALPRGRAAYSEEALNKLTADMLNTGDDLFSARQRIYHVNNSWRPPQPPIGEPLGNPAVDRVLKITNRYLMNCLNRWGQPRRVTIEHTRSGFTSVKQATEHQKISDKRAEYRRDIVKQLEEAGVESVHEYDIRRWEAVQRQNGQCLYCGRDITFKTCEMDHIVPRKGPGSTNTRTNFAAVCPECNRMKSNIPFASWAETKEAKDRGVSLDKAIKQVRFFNFTKNEYSPQAQRNFKKSMIERLKQKTSDEPLDNRSIESVSWMADELYKRIDWYFNHEQYETSKKAINDDKDNLSGTQVVVYPGSITAEARNAAGLGGNIHFIGGRYKTRLDRRHHAVDACVIAMMEPGIARILTERNQLRQAQRLTARIEDDEVNWKDYPTENTAGYNKYQAWSDRMHALLEYMNNALDYDKIPVVRWERLQLGNRSAHEDTIHPLKKLPLSHEISAIDINHASTPALYEALVSLPDFSEQDGLPADPSRQINVNGERYSGDDLVSFFNSNAAQIAIQGGSAELGTAFHHARIYRCWTVGKNGKKKIFFGMIRVYQHDLLHAKNEDLFTYPLKRSSVSMRYAKKEVVHAILSGNAEYVGYLCVGDELVLDLKGDKSNDEGGSRLSGQVGEFVQKFEEDSKVNSQIVNRWTVDGFPDEAKLRLRPSMFAGEGLKNMKSELVENAAIKNILSKTGWRVSVDVISKKSPVVLRRNAFGEPRWKTNAGLPVSYRWQDTETKE

SEQ ID NO: 743 - protein, 1362 aa, Lactobacillus plantarum
MNEPYGVGLDIGTNSVGWTVVDMNGRVRKVKGKTALGARLFKEGATAEDRRGFRTTRRRLKRVKWRLRLLREFFDQPISKIDPNFFARRKYSDISPRDPNYNGLAKTLFNDRTDKEFYDDYATIYHLRDKLMTSNRKFDIREIYLAIHHIVKYRGNFLRTGPASQYGSASLHLATSFQKLNDLFAQSEETLNLKLVTDEALLQQIQQILVRTDLSRSEQQRQIWPLMAVLTGASAAEKKRQKNVVVELSKALVGLKAKMNVVTLTEVDAAVVKDWTFTMEESQDKLPEIEEQLSEVGQQIMDEVIQLYASVNLAQLIPAGKRFSQHMVEKYKHHEKNLELLKTYIHSQSDSKRGREIRATYDRYIDGVDSKPVTQEMFYKDLMKYVEADATSNHLAAEIKDEIDSEQFMPKLRTKQNGSIPYQVQQYELDQIISHQKKYYPWLGEENPVAERRGKFPYKLDELVGFRVPYYVGPLITKEDQQATSGAGFAWMVRKADGPITPWNFDQKVDRIASATAFIQRMQTTDTYLIGEDVLPARSLIYQRFMVLNELNNMRVEDRKLAPQQKQRLYNQVFKQHQHVSVKNIQQNLMDAGEYREAPKITGLADPKGFNSSLSTYHDFKKILPEAIADEHKRADIEKIILWSTTFEDSAIFKQKLEEVAWLTDAQRKQLSGLRYRGWGQLSHKLLIAFKDDNGRSIMDGLWETSDNFMQLRKQPAIETQIKEANQANLTDADIQDTINELYTSPQNKKAIREVMLVLDDIKNAMHGQTPSWIFVEAARGGGVAGRRTQSRSSQIVEAYKGTAKEIVSEKVQHELNEKIKAKADFNTRLVLYFLQNGRDLYTNEAINIDRLSEYDIDHILPQSLVKDDSLDNRVLTSARINREKNDTFASEKFGRKMGAQWRELHRNGLMTQRKLKHLLMRPDEISKHATDFINRQLVETRQVIKLVEELISSEYPAASIVAVKANLTHQFRQTFNFPKLREVNDYHHAFDASLTAFIGMYLLKQYPKLERFFVYGKFAKQPINLTRFNIIRKLAVAEKPIANIETGEILWDKTADIKYFEKLYNYKRLLVTHEVRENYGAMFKQTLFKASDNKSKTLVPKKNHMETSVYGGYSNQETAYLAIVRIPFKSGFKFIVVGIPTRMVAKIKHYQSLGATLKQATHKVIEPKFTKISRKTKQTVISDYEVVLPKVYLDQVVRDQVKGQMYRFSLGSDKEYHNVQELYLPLSIQQAFVGHYDESDDQRSNDLVKVYDAALKQLQRYFPLHLSRNFDQVANQAHQSFEGLKNNVQKSDKQLGKKEVLNSLFVGLHATATRSNLSVLGMSKDFGRLQSRSGITLTDQAEIIYQSPTGLFERKVALKDL

SEQ ID NO: 744 - protein, 1218 aa, Prevotella buccalis
MNKRILGLDTGTNSLGWAVVDWDEHAQSYELIKYGDVIFQEGVKIEKGIESSKAAERSGYKAIRKQYFRRRLRKIQVLKVLVKYHLCPYLSDDDLRQWHLQKQYPKSDELMLWQRTSDEEGKNPYYDRHRCLHEKLDLTVEADRYTLGRALYHLTQRRGFLSNRLDTSADNKEDGVVKSGISQLSTEMEEAGCEYLGDYFYKLYHEQGNKVRIRQRYTDRKKHYQHEFDAICEKQELSSELIEDLQRAIFFQLPLKSQRHGVGRCTFERGKPRCADSHPDYEEFRMLCFVNNIQVKGPHDLELRPLTYEEREKIEHLFFRKSKPNFDFEDIAKELAGKKNYAWIHDKEERAYKFNYRMTQGVPGCPTTAQLKSIFGDDWKTGIAETYTLIQKKNGSKSLQEMVDDVWNVLYSFSSVEKLKEFAHHKLQLDEENAEKFAKIKLSHSFAALSLKAIRKFLPFLRKGMYYTHASFFANIPTIVGKEIWNNEQSRKYIMENVGELVFNYQPKHRDVQGTIEMLIKDFLANNFELPAGATDKLYHPSMIETYPHALRNEFGILQLGSPRTNAIRNPMAMRSLHVLRRVVNQLLKESIIDENTEVHVEYARELNDANKRRAIADRQKEQDKQHKKYGDEIRKLYKEETGKDIEPTQTDVLKFQLWEEQNHYCLYTGEQIGITDFIGSNPKFDIEHTIPQSVGGDSTQMNLTLCDNRFNREVKKAKLPTELANHEEILTRIEPWKNKYEQLVKERDKQRTFAGMDKAVKDIRIQKRHKLQMEIDYWRGKYERFTMTEVPEGFSRRQGTGIGLISRYAGLYLKSLFHQADSRNKSNVYVVKGVATAEFRKMWGLQSEYEKKCRDNHSHHCMDAITIACIGKREYDLMAEYYHMEETFRQGRGSKPKFSKPWATFTEDVLNIYKNLLVVHDTPNNMPKHTKKYVQTSKGKVLAQGDTARGSLHLDTYYGAIERDGEIRYVVRRPLSSFTNPKELENIVDETVKRTIKEAIADKNFKQAIAEPIYMNEDKGILIKKVRCFANSVKQPINIRQHRDLSKKEYKQQYHVMNENNYLLAIYEGLVKNKVVREFEIVSYIEAAKYYKRSQDRNIFSSIVPTHSTKYGLPLKTKLLMGQQVLMFEENPDEIQVDNTKDLVKRLYKVVGIEKDGRIKFKHHQEARKEGLTIYSTPYKNNDDYVPIFRQSIKNINILVDGIDFNIDILGKVTLKE

SEQ ID NO: 745 - protein, 1128 aa, Treponema socranskii
MNDKNQKYRLGLDLGTNSIGWCIYSLDVNNKPETLIDMGVRIFSDGRDPKTKEPLAVERRTARGLRRILHRRKLRRRQMFRLLQEQGLMPNDASEAAALKSLNPYELRVKALDTKLEPYELGRALFNLSVRRGFKSNRKEAVQEKEKDSQNDAKSQNEKCEHLAKAIKDSGCRTLGEFLWKHKNTETQQTENDARNIGMRFVPGRSNYYPTRRMYVEEFDAIRKAQEPYYSGVNWDALHEKLFYQRPLRAQERGKCRYMPDKERTFKAMPCSQKIRILQEVYNMDYIDEYGKTIPLEEAQTDSLISLLDKREKLSFKAMKKELGIDESCTFNLERGGREYLQGNAAAVKLRNKKRFGELWDSLSLAKQDAIVEKLITADEDAEIISMLAQYNLTDEQKKNIAVTVLPSGTAMLCKEVTEMLVQKMEQNKIPLTVAVQMLGYTYADQSVREEDTLPYYGAILTGSTMGAHPEADESEPELKYGKISNPTVHVALNQTRTVVNALIKAYGKPQQIVVELSRDLKASREAKARIQKTITMNQKRNERDNKNITDITKIPYPNRNDRLKYRLWEELGSGSNSFSRKCLYCGKPISGSEIFTENIEIEHILPFGRTLFDGETNKTVAHTDCNRDKGDRSPFEAFGSSPNGYNWHEICARANSLKNPAKRTLFAENAMEKFEKDNSFIQRQLTDNAYLSRSALRYLRCICKDVWSINGGMTKLLRDKWNIDSILKRKIDDPEIAHFELKNDQIGQYKKNRYDHRHHALDASVIALIDRAMVQEISQLNKIRLKNRIEAPQMPVLRSELIEKVKHITVSFKPDHGRQGKLSKETLLGKIKKIEKVDIDSIQTDDIASIKDDAIRTRFETKRRELGDITKAKAALKTEFPKLDVFKTYYVSRTPIVSLTEKNINSIVDEKIKEKLKTFIKEHADLSFAEQLQKFSETEWIGKPSAAGKPGKKYRIEKVRCINWGQTPITITSSAVPRYLCPEDYLAAVVWQIPSKKKDTEPEYKATFLRRDEFDVNNKPKKLEKPHDAAQYICMLYKDDYLEFTESGATHLCRIAGLPASQNNKIDIRPIYAVSDCKDWIIATNENMLEPCWKPQKEEKRISVNVLFGKHKARSVTVNPIGRVFRK

SEQ ID NO: 746 - protein, 1391 aa, Kordia algicida
MKKILGLDLGTNSIGWALVNEAEHEHEQSSIVKLGVRVNPLSVDEKTNFEKGRPLSINADRTSKRSARRNLQRFKLRRKNLINLLLKHHIISNETILTEVGKNTTHQTLKLRSKATQEKISLEEFARILLSINKKRGYKSSRKEKNEDEGFTIDGMAIAKELYDNQLTPGQYVYNILQDGKNYIPDFYRSDLQAEFDDVWQFQKKFYSSILTDEFYLKLKGQGKENTRKLFLAIHQVYTAENKGKRDAVKLQYYKWRSEAVKKQLSIEEVAYVLVEINNNINKSSGYLGAISDRSKALYFNNETVGEYLYGQLVKNRHNSLRNQVFYRQDYLDEFEKIWETQAKFYDELTNELKQEIRDVVIFYQRKLKSQKHLISDCLFEKHHKAIPKSSPLFQEFKIWQNLNYLEFVHTQSKEKIFFSELDDETRQFVFAELNIRGTLKIKEIKKLIGLETPVYWKSNFDEIEGNRTNQVLYNVYQNIADDLGYGFDWSKKHAFEINAELQAIFKDVGIDTAILNFDASIEENDFDKQKSYQLWHLLYSAEDTDKATEEDKLIYGNINTKLKKQLHQKYGFEAKYGNLLANISLQQDYGNLSAKAIKKILPYLESGNSFYEACTIVGYNPSNSLTKEQQQNRKLKDKLELLPKNSLRNPVVEKILNQKVNLINQLIDEYGKPDEVRIELARELKKSAKQRADLSKHINDATLKNQNIRKTLQKDFGIQNPSKNDVIRYKLYDELKDNGYKTLFTNKYIPKEQLFSKDVDIEHIIPKAILFDDSFSNKTLAYRNVNLAKADATAFDFISSKHLDDLDNYKARVETLFQSKRISKGKYKKLLMTRQNLPEDFIERDLRNSQYIAKKATAMLKEVFRSVVPTSGRITDKLREDWDLVNVMKELNLPKYRTLGLTEFIERKNGNKIEQIIDWTKRNDHRHHAMDALTVAFTTHNHIQYLNNLNVTHGLNGVDTDHEKSRLYAIKQAITKVYIVGKTKKRKFIPPMENFRSHAKNHLEGILISFKNKNKVVTKNKNRTKTKTKGVFNEKIQLTPRGQLHKETIYGHAKKVIVTKEKVSSKFTHEKILQVTKPAYREALLKRLASFKNDPKKAFSGKNALSKNPLYFDITSGKKVPDTVKLSYFENSYVIRKEVNSDNFKNEKSLQKVLDVGIRRILEKRLADYNGNAKEAFSNLEKNPIWKDKEKGVCIKKVRIEALKNAEPLHVKKDHLGKIILDDENKSTPVDFISTGNNHHVAIYEDKDGKLHDKVVSFYEVVSRVNLGLPIIDKSFNSHLDWKFLFSMKQNEMFVFPSEDFNPKEIDIGNPKNNELISKYLFRVQKFSKVTYGNSAVRDYVFRHHLETELIDKKELKGITYYQLKSIGMLEKLVKVRINHIGKIVHIGEY

SEQ ID NO: 747 - protein, 1150 aa, Enterococcus faecalis
MYSIGLDLGISSVGWSVIDERTGNVIDLGVRLFSAKNSEKNLERRTNRGGRRLIRRKTNRLKDAKKILAAVGFYEDKSLKNSCPYQLRVKGLTEPLSKGEIYKVTLHILKKRGISYLDEDDTEAAKESQDYKEQVRENAQLLTKYTPGQIQLQRLKENNRVKTGINAQGNYQLNVFKVSAYANELATILKTQQAFYPNELTDDWIALFVQPGIAEEAGLIYRKRPYYHGPGNEANNSPYGRWSDFKKTGQPATNIFDKLIGKDFQGELRASGLSLSAQQYNLLNDLTNLKIDGEIPLSLEQKEYILAELMTKEFTRFGVNDVVKLLGVKKERLSGWRLDKKGKPEIHTLKAYRNWRKIFAEAGIDLATLPTETIDCLAKVLTLNTEREGIENTLAFELPKLAEPVKSLVLDHYKELSQSISTQAWHRFSLKTLHLLIPELMNATSEQNTLLEQFQLKSGVRTRYSEYNKLPTKDVLAEIYNPTVNKTVSQAFKVMDALLEKYGKEQIRYITIEMPRDDNEEDEKKRIKELHAKNSQRKNDSQSYFMQKSGWSQEKFQTTIQKNRRFLAKLLYYYEQDGICAYTGLSISPELLVSDSTEIDHIIPISISLDDSINNKVLVLSKANQVKGQQTPYDAWMDGSFKKTNGKFSNWDDYQKWVESRHFSHKKENNLLETRNIFDSEQVEKFLARNLNDTRYASRLVLNTLQSFFANQETKVRVVNGSFTHTLRKKWGADLDKTRETHHHHAVDATLCAVTPFVKVSRYHYAVKEETGEKVMREIDFETGEIVDEMSYQEFKKSKKYERKTYQVKWPNFREQLKPVNLHPRIKFSHQVDRKANRKLSDATIYSVREKTEVKTLKSGKQKITTDEYTIGKIKDIYTVDGWEAFKKKQDKLLMKDLDEKTYERLLSIAETTPDFQEVEEKNGKVKRVKRSPFAVYCEENDIPAIRKYAKKNNGPLIRSLKYYDGKLNKHINITKDSQGRPVEKTKNGRKVTLQSLKPYRYDIYQDLETKAYYTVQLYYSDLRFVEGKYGITEKEYMKKVAEQTKGQVVRFCFSLQKNDGLEIEWKDSQRYDVRFYNFQSANSINFKGLEQEMMPAENQFKQKPYNNGAINLNIAKYGKEGKKLRKFNTDILGKKHYLYYEKEPKNIIK

SEQ ID NO: 748 - protein, 1234 aa, Alloprevotella tannerae
MPNFWSIFTENLQTYLMKTRILGLDTGTNSLGWAVVDRDENNQYTPICRGDLIFTEGVKQEKGIEFSLAAERTSYRASRRHYFRRRLRKVEVLKVLVKHKLCPPLSDEALNRWHTKKEYPLDEDFILWQRTNEADNKNPYHDRHICLHRKLNLKDSQTDRYTLGRALYHLTQRRGFLSNRLDQNEEAEETGKVKSAISELSKEMKEAGCEFLGDYFYLLYRTEGNRVRIRSRYTDREKHYLQEFKEICRVQELDEDLAKALEKTIFFQRPLKSQRQGVGKCTMEKGHSRCAVSHPLYEEYRLLCYLNNIRIKTPSDDRLRPLNAEEREKITPLFYKEKNFDFEKIAKKLAGKTPFGWIRDAEDWPYQFNYRMTQEAPACPTTAQLIKVFGEDWKAALAETYTMSAKQDGTLKTEDEICTDIWNVLYSFSSKEKLKEFGLKKLQLDEVQAKAFSEIRLTRDFASLSLKAIRKILFFLRTGEDYSKAIFLANIPTIVGEEIWNDIERRSRLLYKVDLALRPQEERDAEEHRTIAERIKAAVAAEVPDAPIDLLYHPSMIEAYPDAKRNERFDCYQLGSPKTNAVRNPMAMRSLHMVRKVINHLLRKHIIDEKTEIHIEYARELNDANKRQAIADWQRELSKRHTAYAQNIRQLYKAETGLVIEPTKADILKYQLWEEQQHVCLYTGKKIGIADFLGANPKFDIEHTIPRSRGGDSTQENLTLCESKFNRDIKRDKLPTELANYEEILARIEHWKKQCYALKLKRDGIRTHSGLEKSIKDSRIRRRHLVGLEYGYLKGKYDRFTMKEVPEGFSRRQGAGIGLISKYAGLFLKSLFKDPKNPNRSNVYVVKGAITAEFRKLWGLQQADEAKSRENHTHHCIDAYTIACIGPCEYAALAAYYRSDEEFKYGRRREKPQFEKPWPTFTEDLLKLQEELLIVHQTTDKLGKRDRRKVKTPRGKFLTGGDSARGRLHQETYYGAINYDGNIKYVVRKPLDSLTEKDLDKIVDETVMGIVKGAVEAKGSLKEALADGIYMNKEKGILIKRVRIFSDVSEPINLKQLRDVSTKEYKRHIHLRKDENYLFAIYEGIDKKKNKKQTETATVDYLDAAKFYKDSKRRDKANSLVGDYSKKNKLPLKCILKKRQMVLFYEHSPEEIRFKDKKDLSRRLYIVTSIAKDGRVKFLHHQAATATGIQSSPSPFTNDGEHQPYYRLSASNIKVLVAGIDFDINILGEITPKL

SEQ ID NO: 749 - protein, 1529 aa, Bacteroides pyogenes
MKKILGLDLGTNSIGWAVVNSFDENQNEESLKHIECLGSRIIPMDAAILGDFDKGNSISQTAKRTEFRGVRHLRERHLLRRARLHKILRLLGFLPDHYVQDLDGHGNFLVNVEPKIAWRKDSNGTFEFIFNDSFDEMLQDFATYQPELIACNRKVPYDWTIYYLRKKALTKKLSKEELSWILLNFNQKRGYYQLRGEEDDESVKTAKTRQYFDRQKIKSIVDTNQTYKGQKVLIVELEDGVKGKIFKKEIPNWVGQEKSIIVTVDIDKDGCDKYEESGELSCRFKIPSDAEWESEWKLIKMKTQKDLDASGKTVGAYIYDAILQNPSQKIRGKLVRTIERKYYKEELKQILKKQVEFHPELRDKDLFLDCLNELYPNNDAHRNACADRDFIYLFMDDILFYQRPLKSKKSLIADCPYEKHMYRDKETGELKYSSVKCIAKSHPLFQEFRLWHFISNIRIYQKERVIDVDACQPDLSSARSALKSKLEADVDVTNEFLTCEADYVSLFEWLNNKKSVSQKDFLKYPAFGIKKSGDNYRWNYVEDKSYPCNETRALILSHLEKANIRGDIFTREQEEALWHILYSVEDRYEIVKALQSFAAKYRFNDDFVTVFSKFPPFKKEYGSYSAKAIKKLLPLMRMGKYWSESAIDIKTRERIEKIITGECDDSIRERVRLKAIRLHDIEHFRALPVWLACYVVYDRHSESGDIMKWKTPQEMDSYIQNFKQHSLRNPIVEQVITETLRVVRDIWKQVGRIDEIHVELGREMKNPADKRKEMTKRIIENENTNLRIKAMLTEFLNPEFEIENVRPYSASQQDILRIYENGVLNSVSEIPEEITGILKKFNEREQRKRPSTSEVLRYKLWLEQKYCSPYTGKMIPLGKLFTPAYEIEHVIPQSRYFDDSFNNKVICEAEVNKLKGNLLGYEFIKKHHGQRVDLGLGEIVDIFSVDEYETFVKDYYSGNQQKMKKLLMDEIPEQFIERQLNDSRYISKVVKSLLSNIVREQDEQESISKNVIVCTGGVTDRLKKDWGINDVWNKLILPRFQRLNNITETTEFTAKNMEGHEIPVVPFEYQRGFNKKRIDHRHHAMDAIVIACASRNIVNYLNNESARKKARISRYDLQKLLCDKVRTDDNGNYKWILKKPWGTLTQDVYAALDNVIVSFKQNLRVINKTKNYYVHYEAGKKTIAKQEKGSSWAIRKPMHKDTVFGEVNLRKVKTVSLNEAIKNPQCIVEKDFKKKLLSLLKQNFDAKKVKAYFEEHKDVWSDINLSKIEVYYFTKDTKERFFATRKPLDSSFDKKEIESVTDTGIQKILLRHLEQKNGDPDLAFSPDGIEEMNHNIVQLNGGRKHQPIVKVRVYEKADKFAIGQQGNKSSKYVEAAKGTNLFFAVYEEEVRDKKTNAVMLKRHYASIPLNVAIDRQKKGLSTAPEDENGNVPIFVLSPNDLVYLPTAEDIANASISFPINKNRIYKMVSCTGNRCFFIKHHVANVIVDKSEFSVLNKIEKAETDEMIKEICVPIKIDRLGNIVKIGVYK

SEQ ID NO: 750 - protein, 1084 aa, Subdoligranulum sp.
MKNTLYGIGLDIGVASVGWAVVGLNGTGEPVGLHRLGVRIFDKAEQPKTGESLAAPRRMARGMRRRLRRKALRRADVYALLERSGLSTREELAQMFEAGGLEDIYALRTRALDEPVGKAEFSRILLHLAQRRGFKSNRRTASDGEDGRLLAAVNENRRRMAQGGWRTVGEMLYRHEAFALHKRNKADDYLSTVGRDMVAEEASILFERQRAMGCSWAAPELQAEYLSILLRQRSFDEGPGGNSPYGGNQVEKMVGRCTFEPDEPRAAKAAYSFEYFSLLQKLNHIRLAENGETRPLTQPQRQQLLSLAHKTPDISLARIRKELALPETVQFNGVRCRANETLEESEKKEKFACLPAYHKMRKALDGVVKGRISSLSISQRDAAATALSLYKNEDTLRAKLTEAGFQAPEIDALAGLTGFSKFGHLSLKACRKLIPHLEQGLTYDQACTAAGYDFKGHGAGERAFTLPAAAPEMEQITSPVVRRAVAQTIKVVNGIIREMDASPAWVRIELARELSKTFGERQEMDRSMRENAAQNERLMQELRDTFHLLSPTGQDLVKYRLWKEQDGVCAYSLRRLDVERLFEPGYVDVDHIVPYSLSFDDRRSNKVLVLSSENRQKGNRLPLQYLQGKRREDFIVWTNSSVHDYRKRQNLLREKLSGDEAEGFRQRNLQDTQHMARFLYNYISDHLAFAQSEALGKKRVFAVSGAVTSHLRKRWGLSKVRADGDLHHALDAAVVACTTDGMIRRISGYYGHIEGEYLQDADGAGSQHARTKERFPAPWPRFRDELIVRLSEQPAEPLLDINPEFYCEYGTEHIRPVFVSRMPRRKVTGPGHKETIKGAAAADEGLLTVRKALTELKLDKDGEIKDYYMPSSDTLLYEALKAQLRRFGGDGKKAFAEPFYKPKADGTPGPLVRKVKTTEKATLTVPVHGGAASNDTMVRVDVFLVPGDGYYWVPVYTADTLKPELPNRAVVQGKPYSEWKEMREEDFIFSLYPNDLVYVEHKSGLKFTLQNADSTLEKTRTQTSAFAYFVSGSISTASITIRTHDNAYGIPSLGVKTLKTFHKYQVDVLGNVFPVHKETRQKFR

SEQ ID NO: 751 - protein, 1060 aa, Cloacibacillus evryensis
MNASILEHYSLGLDIGITSVGWAVLNLTVGKIADLGVRLFDKAEEPKTGASLAAPRREARNMRRRLRRKRQRMSNIRSLIISCGILSQTDMDNLFNSPHQCTPWELRTEGLDRLLTCEEWSRILIHMAKHRGFKSNRTVAESDIKNSEDGRVLSGIKENSELLQAGNNGAGYRTVGELIQSDPKFSGHKRNKGGEYSHTILRKDIEKEIEALFEEQRKFGSTYASMELEKEYKDIFGRQLPFASDGAIEKLIGYCFLEPAEKRAPKASWTAERFILLSKIMNLRVRLDGKKVSLSGDERITIDNLAYKNTKVTYKQIRKALNWQDNLIFDSLPFTKKDKDPEDSVFIELKGWHTFRKCLSEKLGTDYWETISVNPDLLDDLAYTLTFKKTDEDIARYLEERNIDKKIIDAVLPLNFSGVVNLSAAAMGKLIPLMEKDGCRYDEACVKAGYLHYKPAEKERSLKLPVPDWKEIRNPVVIRAIAETRKVVNAVVRKYGPPESVQVELARDLSRSKEERDKIIKEQEENRSQKEKLAKEFQDKFDYAPNGRQLEKFRLWKEQNGFCLYTGQYLAPEDVFNGSDDSFAEIDHIIPYSISFDDSRINKVLATSGANRDKGNRLPYYYFGGDGEKWNEFTARVNANIQNRKKAARLKIKSLDESDISEMKERNLSDTRYITEYVAKWLEENLLFAEKKTENHVTRINGRATATLRWQWGINALKDRESSDLHHALDACVVAAATPGIIKKISDYSRNRELQKLKINAEGNKKRRCPEPWEHFRKEVEARLSENPAEKILEFGLASYSESELNDLKPIFVSRRPDRGATGAAHKDTIYSAKYLNDDPPKIVVKKALTSLKKSDLENIVGKERDRALYEALAKKLEEYEDNPEKAFKDVFRKPTSNGKPGPIVHSVKIFDSRVTGLPVNGGIAFNDGMVRIDLYQKNGKYFLIPYYISDIAKKIVKDKAIAQGKREDDWIAIDETYNFVFSLFKNDLVRIIDSKGREIFGYYNSCDRATGAIEIKKHDGSASWRGIGIRTAKLIEKYQADVLGSYYKIKKEKPPHGLA

SEQ ID NO: 752 - protein, 1506 aa, Prevotella nigrescens
MKTILGLDLGPNSIGWAKVEVDDEGNYLRNIKLGSRIIPMTQDMLGDFDKGVKVSQTAIRTDFRGNRRLIERHLLRRERLHRVLHALKFLPKHYEDAIGWDRNEPATYGKFVNNSEPKLAWERQEDGSMRFLFMESFNEMVADFAQNQPSLVSDGKKIPLDWTIYYLRKKALTRPIKKEELAWILLNFNQKRGYYQLRGEEEEDNLTKRKEYYKLKVVGVEADGAPKGGKTWYNIHLENGWTARCQSKIPLDDWVGKVKEYIVTTEYEDDGKTPKCDKEGKVKRSFKSPEKDDWQLIKTRTEKFIDDSNKTVGAFIYDYLLEKPFDKIRGKYIRTIERKYYKNELREILREQTKYHEGLHSLEALKICAEELYKNNQQHQEYLLKKDMTFLLLNDLIFYQRPLKSKKSLIADCPYEVYKYDDKLTGKKGQKKIKCIAKSNPYYQEFRLWQFIANLRLFSVTDGKEVTAEYLKTEEDYVRLFSFLNDRKDIKQETFLRSFLKLKKESIGSEKIYPIRWNYIEDANKSYPCNATRHELLLAFDRADIPRELLDVEEREYRLWHLLYSIEAKEETESALRKLKANKAFGDLNIDDAFVNSFLKIKPFEKEYGAYSEKAIKKLLAVMRRGSLWKEADICEATKQNIAKILQNDIDEKLKKKIEAAVSSFNKLSDFQGLPTWLACYVVYGRHSEAAQIQCWQSPEDLKTYINKFKQHSLRNPIVEQCLLETLRTVYDIWKDAGQIDEIHIELGRNMKSTAEQRARKTKDILRNENTNLRIKNLLVELKNDDKIENVRPYSPSQQEILRIYEEGALQELSKEDEMFEDISKISKMAQPSPTELSRYKLWLEQKYRSPYTGRVIPLSKLFTTAYQIEHIIPQSRYFDDSFNNKVICESEVNSLKDNMLGYEFIKECGGRIVHCTLLGDVKIFTKEEYKDFVTKHYIDNTYKRDKLLLEDIPQEFSARQLNDSRYISKMVQTVLSNIVRAENEQEATSKFVVSCNGAITNRLKKDWGLNDVWSSIVCPRFKRLNEITKTNAFGHWEDKAGKHVFQTTVPLELQRGFSKKRIDHRHHAMDALVIACASRNIVNYLNNESANSPEKREDLRKKLCDEKRKIRKPWKTFTQDAREALSDVVVSFKNYVRVINKATNYYEHYSSSGNKVMISQKGNDMWAIRKPLHKESVFGRVNLCRKVIVSLKKALENIPAICDKTLRDYINALVEKHFNTRQLLAHFKSINYRLNRQCVEKVEVWQFSDEKIEMVARRKSLDTSFDDKQISSITDTGIQKILLNYLQTKDGNAEIAFTPEGIEEMNKNISLYNDGKAHQPILKVRVATPKGMKYPVGQTGNKATKFVVAEKGTNLYFAIYENELGVRSYDTIPLNIVVERLKEGLSPVPQANEADIPLKFYLSPNDLVYVPTKENEDELCRDRIYKFVDSSGTTANFVPHTSANTIYNVDKEYAEKCCNGAVFLNEYGLGSPQSKNQRALTGEMIKEICWKLKVDRLGNIIKVIK

SEQ ID NO: 753 - protein, 1354 aa, Indibacter alkaliphilus
MKKILGLDLGTTSIGWAFIKEPEKDVVGSEIVDMGVRIVPLSSDEENDFAKGNTISINADRTLKRGARRNLQRFKQRRNALLETFKEKNLIPSNFQYAEDGPSSTFSTLKLRDKAAKEKIELDDFVKVLLQINKKRGYKSSRKAMSEEDEGTAIDSMGIAKELYENDLTPGQWVYEALKNGRKNVPDFYRSDLQEEFKKIVNYQSEFYPDILNTSFVEDWMGKASTPTKQYFNKRGVQLAENKGKREERRLQEYKWRAEAVNFKIDLSEIALILSQINSQISNSSGYLGAISDRSKELYFKNLTVGQYLYQQVKKNPHTRLKGQVFYRQDYLDEFEKIWSVQSSFYPQLNDELKQEVRDVTIFFQRRLKSQKHLISNCEFEEHHKVVPKSHPIFQEFRIWQNLNNLTLIKKDNLNEKCELALEDKTALANELAFKKELSVKDALKVLGLKPSDWEFNFTKIEGNRTNHAFFEAFAKIIELEDGEPIDLGNLKADDILDQFSEAFLRIGIDTELLQVNSDIEGAEYEKQSYIQFWHLLYSSEDDQKLKQNLIRKFGFKPEHAKILASISLQDDHASLSSRAIKKILPHLQSGLIYDKACTYAGYNHSSSFTKDENEKRELRAELELLKKNSLRNPVVEKILNQMINVVNAILKDPNLGRPDEIRVEMARELKANAEQRKNMTSNIASATRDHEKYREILKKEFGLKRVTKNDLLRYKLWLETDGISLYTGKPIEASKLFSKEYDIEHIIPKARLFDDSFSNKTICERQLNIDKANVTAFSFLQNKLSADEFEQYQSRVKSLYGKLSKAKIQKLLMANDKIPEDFIARQLQETRYISKKAKEILFEITMRVSVTTGTITDKLREDWGLVEIMKELNWEKYDKLGLTYTIEGKHGERLNKIKDWNKRNDHRHHAMDALTVALTKPAYIQYLNNLNAKAIGNKKGTEIFAIEQKYLKRENGKLCFIPPIENIRAEAKKHLSKILVSYKAKNKVVTINKNKTKKKAGFNEQTALTPRGQLHKETVYGKSFHYSTKFEKIGASFDAQKINTVAKKEEREALLKRLAENGNDPKKAFTGKNSLNKMPIYLDLGKNIKLSEKVKTVVLEQNYTIRKNIDPDLKVDKVIDVGIKRILESRLEEFGGNAKLAFSNLEENPIWLNKEKGIPIKRVKISGVSNVESLHVKKDHFGEKILDEEGNEIPVDFVSTGNNHHVAIYEDEDGNLQDEVVNFYEAVIRRNQGESIIKYRHEEGWNFLYSIKQNEFFVFPSQDFNPNDFDLLDPKNYDLISPNLYRAQKFSKVMYGNSAVRDYVFRHHLETVLNDVKELKDVAYKQLKSLQYLNGIKKVRLNHLGQIIQVGEY

SEQ ID NO: 754 - protein, 1374 aa, Streptococcus pseudoporcinus
MKKRYSYSIGLDIGTNSVGWAVINEDYKVPAKKMTVFGNTDRKTIKKNLLGTVLFDSGETAQARRLKRTNRRRYTRRRYRLCQLQNIFATEMVKVDDTFFQRLSESFFYYQDKAFDKHPIFGNSKEERAYHKTYPTIYHLRKDLADRDQKADLRLIYLALSHIIKFRGHFLIEGKLNSENTDVQKLFIALVTVYNLLFEEEPIAGETCDAKALLTAKTSKSKRLESLISEFPGQKKNGLFGNLLALALGLRPNFKSNFGLSEDAKLQITKDTYEEELDNLLAEIGDHYADLFLAAKNLSDAILLSDILTLSDENTRAPLSASMIKRYEEHQEDLALLKKLVKEQMPEKYWEIFSNAKKNGYAGYIEGKVSQEDFYRYIKPILSRLKGGDEFLAKIDRDDFLRKQRTFDNGSIPHQIHLKELHAILRRQEKYYPFLAEQKEKIEQLLCFRIPYYVGPLAKGGNSSFAWLKRRSDEPITPWNFKDVVDEEASAQAFIEGMTNYDTYLPEEKVLPKHSPLYEMFTVYNELTKVKYIAENMTKPLYLSAEQKEAIIDHLFKQTRKVTVKDLKEKYFSQIEGLENVDVTGVEGAFNASLGTYNDLLKIIKDKAFLDDEANAEILEEIVLILTLFQDEKLIEKRLAKYANLFEKSVLKKLRKRHYRGWGRLSRQLIDGMKDKASGKTILDFLKADDFANRNFIQLINDSSLDFEKLIDDAQKKAIKRESLTEAVANLAGSPAIKKGILQSLKVVDEIVKVMGHNPDNIVIEMSRENQTTAQGLKNARQRLKKIKEVHKKTGSRILEDNSERITNLTLQDNRLYLYLLQDGKDMYTGQDLDINNLSQYDIDHIIPQSFIKDNSIDNLVLTTQKANRGKSDNVPSIEVVRDMKDRVWRRQLANGAISRQKFDHLTKAERGGLADSDKARFLRRQLVETRQITKHVAQLLDSRFNSKSNQNKKLARNVKIITLKSKIVSDFRKDFGLYKLREVNNYHHAHDAYLNAVVGTALLKKYPKLEAEFVYGDYKHFDLVKLISKSDPSLGKATAKVFFYSNIMNFFKEELSLADGTLMKRPVIETNTETGEVVWDKVKDFKTIRKVLSYPQVNIVKKTEIQSGAFSKESVLSKGNSDKLIERKKGWDPKKYGGFDSPNTAYSIFVVAKVAKRKAQKLKTVKEIVGITIMEQAEYEKDNIAFLEKKGYQDIQEKLLIKLPKYSLFELENGRRRLLASANEFQKGNELALSGKYMKFLYLASRYDKLSSKIESEQQKKLFVEQHLHYFDEILDIVVKHATCYIKAENNLKKIISLYKKKEAYSINEQALNMLNLFIFTSLGAPSTFVFFDETIDRKRYTTSSDVLNGILIQQSITGLYETRIDLSRFGGD

SEQ ID NO: 755 - protein, 1372 aa, Filifactor alocis
MLKEEYILTKEYYLGLDVGTNSVGWAVTDSQYNLCKFKKKDMWGIRLFESANTAKDRRLQRGNRRRLERKKQRIDLLQEIFSPEICKIDPTFFIRLNESRLHLEDKSNDFKYPLFIEKDYSDIEYYKEFPTIFHLRKHLIESEEKQDIRLIYLALHNIIKTRGHFLIDGDLQSAKQLRPILDTFLLSLQEEQNLSVSLSENQKDEYEEILKNRSIAKSEKVKKLKNLFEISDELEKEEKKAQSAVIENFCKFIVGNKGDVCKFLRVSKEELEIDSFSFSEGKYEDDIVKNLEEKVPEKVYLFEQMKAMYDWNILVDILETEEYISFAKVKQYEKHKTNLRLLRDIILKYCTKDEYNRMFNDEKEAGSYTAYVGKLKKNNKKYWIEKKRNPEEFYKSLGKLLDKIEPLKEDLEVLTMMIEECKNHTLLPIQKNKDNGVIPHQVHEVELKKILENAKKYYSFLTETDKDGYSVVQKIESIFRFRIPYYVGPLSTRHQEKGSNVWMVRKPGREDRIYPWNMEEIIDFEKSNENFITRMTNKCTYLIGEDVLPKHSLLYSKYMVLNELNNVKVRGKKLPTSLKQKVFEDLFENKSKVTGKNLLEYLQIQDKDIQIDDLSGFDKDFKTSLKSYLDFKKQIFGEEIEKESIQNMIEDIIKWITIYGNDKEMLKRVIRANYSNQLTEEQMKKITGFQYSGWGNFSKMFLKGISGSDVSTGETFDIITAMWETDNNLMQILSKKFTFMDNVEDFNSGKVGKIDKITYDSTVKEMFLSPENKRAVWQTIQVAEEIKKVMGCEPKKIFIEMARGGEKVKKRTKSRKAQLLELYAACEEDCRELIKEIEDRDERDFNSMKLFLYYTQFGKCMYSGDDIDINELIRGNSKWDRDHIYPQSKIKDDSIDNLVLVNKTYNAKKSNELLSEDIQKKMHSFWLSLLNKKLITKSKYDRLTRKGDFTDEELSGFIARQLVETRQSTKAIADIFKQIYSSEVVYVKSSLVSDFRKKPLNYLKSRRVNDYHHAKDAYLNIVVGNVYNKKFTSNPIQWMKKNRDTNYSLNKVFEHDVVINGEVIWEKCTYHEDTNTYDGGTLDRIRKIVERDNILYTEYAYCEKGELFNATIQNKNGNSTVSLKKGLDVKKYGGYFSANTSYFSLIEFEDKKGDRARHIIGVPIYIANMLEHSPSAFLEYCEQKGYQNVRILVEKIKKNSLLIINGYPLRIRGENEVDTSFKRAIQLKLDQKNYELVRNIEKFLEKYVEKKGNYPIDENRDHITHEKMNQLYEVLLSKMKKFNKKGMADPSDRIEKSKPKFIKLEDLIDKINVINKMLNLLRCDNDTKADLSLIELPKNAGSFVVKKNTIGKSKIILVNQSVTGLYENRREL

SEQ ID NO: 756 - protein, 1126 aa, unidentified
  source 1..1126: note = Streptococcus
MTNGMILGLDIGVASVGVGIIEADSGKIVHASSRIFPSANADNNVDRRKFRGSRRLLRRKKHRVKRLQDLFDKYDIVTNFDNLNLNPYELRVKGLNEPLSNEELFASLRNITKHRGISYLDDGEDDSSGNGTEYAKAIELNQQLLKEKTPGQIQFDRLNQYGQLRGNFDIVDENGEIHHVINVFSTSSYRKEAEQILKKQSETNTSISTDFINDFIQLLISKRKYYHGPGNPKSRTDYGRYRTDGTDLDNIFDVLIGKCSFYPEEYRASKTSYTAQEFNFLNDLNNLTLPTETGKLSEQQKIDLVNWAKETKILGPKKLLQEIAKRNNCKFEDIRGYRLDNKDNPDMHVFDVYRKMNFDLETISVKDLSVDSLNQLARILTLNTEREGIEEAIKKLMPNQFTEKQMLELIAFRKSNSSIFGKGWHSLSIKLMKELIPELYHTSDEQMTILNRFGKFKLTKLDSKRTNYIDENSVTDEIYNPVVAKSVRQAIKIINASIKKWGDFDKIVIEMPRDKNEEEERKRIADGQKVNAKEKEQAEKHAAKLFNGKEELPSEVFHGYKELALRIRLWYQQDQKCLYSGKEITISDLIYNRELFEIDHILPLSLSFDDSLSNKVLVYCWANQEKGQRTPFQALDSMKSAWSYREFKNAILHNSKISRKKRDYFLTEQDISKIEVKQKFIERNLVDTRYASRTVLNVLQQSLKNLEKETKVSVVRGQFTSQLRRKWHIDKTRDTYHHHAVDALIIAASAKLRYWKKQGDILFENYLINRHVDRVTGEIQSDDSYKEEVFTPPYDGFVQTISNPGFEDEILFSYQVDSKVNRKISDATIYATRSAKLEKDKKEQTYVLGKIKDIYSQTGFENFLKIYNKDKSKFLIYQKDPETWEKIIEPILKNYREFDNKGKDIVNPFEKYRNDNGPICKYSRKGNGPEIKQFKYYDTVLGKYIEITPESSRNIVALRSLNPWRTDVYFNEKTLKYEFLGLKYSDLNIQNKEEYGISEENYQKIKKEEGVSEESIFKFTLYRNDLIIIKDLSKGKSQIFRFWSRTGKVNEKHKLELKPYNKSSFEKGESLEVIRNLYPSSNQFQEKLNKSDLSIYKLKTDILGNKFISKNENLFPKLIYKKIKRK

SEQ ID NO: 757 - protein, 1127 aa, Treponema maltophilum
MNDKNQRYRLGLDLGTNSIGWCIYWLDGNNKPDALIDMGVRIFSDGRDPKTKEPLAVERRTARGLRRILYRRKLRRKQMFRLLREQGLMPNDPSEATALKSLNPYELRVRALDAKLEAYELGRVLFNLSVRRGFKSNRKEAVQEKEKDNQNDVKSQNEKCERLANAIKDSGFRTLGEFLWKHKNTETQQTENNTRDIGMRFAPGRSNYYPTRRMYVEEFEAIRKAQEPYYRGVNWDALYEKLFYQRPLRAQERGKCRYMPDKERTFKAMPCSQKIRILQEVYNMDYIDALGKAFPIGNAQTDMLIALLDKKEKLTFKAMKKELGIDESCTFNLERGGREYLQGNTTAVKLRNKNRFGDLWDSLSPVEQDTIVEKLITADEDAEIISILEQYDLTDEQKKNIAAIVLPSGTSMLCKEVTEMLVQKMEQNKIPLTVAVQMLGYRYADQSVHEEDELPYYGAVLTGSTMGAHPEQDESKPELKYGKISNPTVHVALNQTRTVVNALIKAYGKPQQIVVELSRDLKASREAKARIQKTITMNQKRNERDNKNITDITKIPYPNRNDRLKYRLWEELGSDSFSRKCLYCGKPISGSEIFTKDIEIEHILPFGRTLFDGETNKTIAHTSCNRDKGNSSPFEAFGSSPNGYNWHDICARANSLKNPAKRALFAEKAMEKFEKDSSFIQRQLTDNAYLSRSALRYLRCICKDVWSVNGGMTKLLRDKWNIDSILKREIGDTEITHFELKDEQIGQYKKNRYDHRHHALDASVIALIDPDMVQAISLSNQNHLINRIKVPQMPVLRSELIEKVKHITVSFKPDHGRQGKLSKETLLGKIKKIEKVNIDSIQTDDDIASIKDDVVRTRFETKYREFGDLTKAKAALKTEFPKLDVFKTYYVSRTPIVSLTEKNINSIVDEKIKEKLKTFIKEHADLSFAEQLQKFSETEWIGKPSAAGKPGKKYRIVKVRCINWGQTPIRIASSAVPRYLCPEDYLTAVVWQMPSKTKNAESEYKATFLRRDEFDVNNKPKKLEKPHDAAKYICMLYKDDYLEFTENGIAYLCRIAGLPASQENKIDIRPIYAASNCKDWIIATNDNMLEPCWRAKEQEKRISVNVLFGKYKAHSVTVNPIGRVSRK

SEQ ID NO: 758 - protein, 1390 aa, Lactobacillus paracasei
MIIRTYELKTITTIAILKMFQLLTGGLSMTKLGKPYGIGVDIGSNSIGFAAVDENSHLIRLKGKTVIGARLFEEGKAAAKRRAGRTTRRRLSRNRWRLSFLRDFFESHITPTDPNFFMRQKYSEISPKDKARYKYEKRLFNDRTDAEFYQQYSTMYHLRNRLMTDPSRADVREIYFAIHHILKSRGHFLTPGDAKDFNTNDVALDEIFPALQDAYAQVYPDLGITFDEDKANEFKTILLNEIATSIDTQRALVKLLLAEEDDKDILKQQKQVLTEFAKAVVGLKTKLNLALGTEVDSSEATAWNFSLGQLDDKWAGIESAMTDEGTEILDQIRDLYRARLLNGIVPTGKTLSQAKVDDYTQHHEDLQLFKAYLKQLEDDGTAKAIRQLYDRYIDGDDAAPFLRENFVKALTKDVTAHPNTKSPELLERLAQPDFMLKQRNKANGAIPVQMQQRELDQIIKNQAVYYDWLAAPNPVEKHRKSMPYQLDELLNFRIPYYVGPLVTAKEQKAAQGGVFAWMVRKDPEGNITPYNFDEKVDREASANTFIQRMKTTDTYLIGEDVLPKQSLLYQRYEVLNELNNVRVNNEKLSIEQKQQVIRELFERHNSVTIKQFAENLRAHGDYAHIPEIRGLADEKRFLSSLSTYRQLKSLLPEAIDDPAKQADIENIIAWSTVFEDAAIFKTKLKEISWLGSEAITKLSNIRYRGWGQFSRKFLNGLTLGNGHTIIQELLLSTNNLMQILTDETLQKKMTELNADKLKTANINDAIDNAYTSPSNKKALRQVLRVVDDIKRAADGQDPSWLYVETADGGGTPGKRTRARQHQLQEIYANAAHELIDTAVRGELEDKISDKADFNDRLVLYFMQGGRDIYTGAPLNIDQLSSYDIDHILPQSLIKDNSLDNRVLVHAIINREKNATFASTIYAQKMNATWRQWHEAGLISGRKLRNLQMRPDQIDKYASGFVARQLVETRQIIKLTEQIVAAQYPDTKIIAVKAGLSHQLREELEFPKNRDVNHYHHAFDAFLAARIGTYLLKRFPNLQAFFTYGKFTKADVKKLRGFNFIRDITHAEDKIVAKDTGEVVWDKQRDVDELDRIYNFKRMLITHEVRFETADLFKQTVYGARDSKEAGGSKQLIPKKKGYPVDIYGGYFRENTAYLAVVKVTKKTETIFKVVKIATSQVAALNKARSRSTAEELSVLTELLKPKFSKVGKNGKITDTPFEVVLPRVPREQLFYNAKYGFFMVNSDTMFHNFQEIWVSRSDQKILQQIRKAKIDYPNVDQDLDNLFHNLADQIVKYFDLYSIAGFKEKISQSQNTFNDLAVDDTDQSVGKITVINELLKGAQANGMTGSLKVLKISTPFGFTQDKSGVLTKDSSIIYQSPTGLFERSVRLTDL

SEQ ID NO: 759 - protein, 1097 aa, Neisseria wadsworthii
MKKQPQRYILGLDLGIASVGWALILVDGAENPVGLLDCGVRTFERAEVPKTGDSLALARRQARSVRRLIRRRAHRLLRLRRLLKREGILSAADFNSDGLPNLPIDAWQLRVAGLERKLTNQEWAAVLLHLVKHRGYLSQRKSETQTENKELGRLLAGVAENSKLLSESSEQYRTPAELAVKLFAEQSGHLRNKGGEYTHTFNRLDLQKELHLLFERQYALGNPFASAELQSKVDELLMTQRSALQGEAVLKMLGKCTFEPSEYKAAKNTYSAERFIWLTKLNNLRILYNGEERALDEGDRKKLLDEPYKKAKLTYKQVRSILNLPESAVFKGLRYGKDSDGLKAENGTLMEMKAYHKIRTILDKAGLKGEWENRIRNPEILDKIGTAFSLYKTDEDIQAALADLRLPENVLDALLAGLNFDKFIQLSLKALRNILPLMERGIRYDEACKEVYGDHRALAESKNQVLLPPIPADEIRNPVVLRTLTQARKVINAIIRRYGSPQRVHIETARELGKSKQERDKIDRKNKENQNDRNRLASDIRKHFNFEPTPKDILKLRLYEQQHGKCLYSDLREEKGECLYTGNVIELHRLFEDGYVEIDHALPLSRTWDNSLNNKVLVLKSSNQNKGNKTPYEWLDGANNSRRWREFQARVQGCHFPYVKKQRIQTAKLDSKAEQGFLERNLNDTRYISKFMCQFITANLRLAETSNALMEEVAGENPYWKERKRQRVFAPSGSIIALLRGLWGLKKVREDNDRHHALDAIVVACSTVSMQQKITKAMQRRETLETVDSETGEVKTRIPQPWDFFRQEVMIRVFSDSPREELAEKLNSRPEALHDFVSPLFVSRAPNRKMTGQGHLETVKSAKRLSENISVVRKPLTALKLKDIENIVGYPDREPALYQALRERLLAHKDDPVKAFADKPFYKPAKDGGQGSLVKAVRIIENTKHGLKIRNGITDTNGDMVRTDVYQKTDKKGKRQYFIVPVYAWQVEKNELPTVDCKGYEIDDNYEFCFSLYKYDLIEIQNPNDINQELRAYYINCDSSDGRFWLAYHDKSAKEQQFRISTQNQPIIKKYQVDTLGKEIRLCKAEKRTALNGKKKK

SEQ ID NO: 760 - protein, 1038 aa, Bordetella pseudohinzii
MAKQVRYRLSLDLGSTSLGWAIFRLDADAHPTAIIKAGVRIFSDGRNAKDGSSLAVTRRAARSMRRRRDRLLRRKTRMLDALLEYGFFPQDAAQRKALERLNPYALRAEGLARPLTPGEFARAIFHLNQRRGFKSNRKTDKNDNDSGALKTATSQLRQDIQASGCRTVGEWLWTQRLQKKPEGVPHQGVRARYRETPHINSEGKKRIEKKYDLYIDRSMIEAEFDALWSAQATFNPVVFHATAHEKLKDILLYQRPLRPVKPGRCTLLPEEERAPLALPSTQRFRIYQELNNLRLLVDQLNEQPLTLAQRDTIATLMEGRAKISFDQIRKALKLGSMTKFNLEDDKRNELKGNATGSQLAKKEFFGPAWHQFDEALQDDIVWHLLSEENESALISWLQDRTGIDAATAQAVSNASLPEGYGSLSRKALEVILPRLRSEVITYDKAVQAAGFSHHSQLGFEYDPDDVEDWIDHATGEVKPIFKRLPYYGKALQRHVAFGSGKPEDSQEKRYGKIANPTVHIGLNQVRVVANALIARYGRPTEIIIELARDLKQSREQRQQDQRRQADNQKRNARIRNSIAQALGIAEARVRREDIQKWILWEELDPGDAMHRCCPYSGVPISASMLLSEQVEIEHILPFSMTLDDSLNNRTVSLRQANRIKRNRSPWDAREDFEAQGWHYDGILQRAGLMPVQKRYRFAADGYQRWLRDDQDFLARALNDTRYLSRIAAEYLRLVCPQGTRVIPGQLTALLRRRFGLNDILGLEGEKNRNDHRHHAVDACVIGITDHGLMQRFARASAQAREQGLTRLAEEMPLPWPTYRDHVDRAVSLIWVSHKPDHGHEGAMMEETAYGLMKDGTIRQRHKADGTKGREVANVIRIAEPAQPTRHGVDDQGRPLPYKGYIGGSNYCIEITRGAQGKWEGTVISTSDAYGIVRARGIAGLRNTSQGQNGHPLVMRLVIGDSLRLRINDALQTMRVTKISGNGQVFMAGVHEANVDARNRDKSQAFALVSKMAGSLQAAQARQATISPIGEIRDPGFPG

SEQ ID NO: 761 - protein, 1446 aa, Flavobacterium suncheonense
MARILGLDLGTNSIGWAIVDKNGTEFSLVDKGVRIFSEGVKSEKGIESSRAAERTNYRSARKIKFRRKLRKYETLKVLSQNGMCPLSVDEVNGWRKSGFKQYPLNPEFLKWLRTDDNQNINPYIFRDRASRQKVSLYELGRALYHIAQRRGFLSNRLDQSADGIIEQHAPNIESRIEEAQTVNDLMVEIEDYFDGLDILEKNSKDLDEGEKKLKSLYNALEKIIKSNDFEKAKAEVIARLNRKEDQGAVKQEIGEISKAMKDGNFGTLGQYFYSLYSKGKIRNHYTAREEHYLAEFEIICKAQGITEINENEKLPEKRYSGLAKELYRAIFFQRPLKSQKGLIGKCSFEKNKTRCAISHPDFEEYRMWSYLNTIKIKTPEDEKLRFLTLAEKQRLIPKFLRKKDNFNFEDLAKELIVKGTTFEFYKSSNAKSAHYLFNYKPKDTVPGSVVSASLKNIFGDDWNTKQWNYQTQNSKGETVTRTVYYKDIWHLLSVSTSDIYLEEYAKNKLGLDEKRAKSFSKIRLKKDFASLSLNAIAKITPYLKQGLLYSHAVFMANIENIVDEHIWNNPKERLYIQNKIAEIIDDNTLENSKLEIINGLIKECKADNCYYSKEAEHTYKNDLQKKVATIFRNNEDQDDIVEELFPIFIIQLQKHEYIPIKRLDEKVIEFLKGENEDGEIYCSNQNRLHKLYHPSDIEVFKKKIIKDEFGNEKVVLGSPLISSIKNPMAMRALHQLRKVLNTLILEGLVDEKTKVHIELARELNDANKRKAIQDFQKENQNKRQDLAKQIKEDYKAQTGKDIEPTEDDILRYQLWVEQNGMEIYEPTLNGGVSKKIGIHQIIGENPDYDIEHTIPRSISQDNSLMNKTLCSKRFNRDIKKNQMPIELNNYELLLPYIDHWRKEADKLTWEIEQIIKSTKAAATKEAKDKKIRRRHYLTLKRDYLKGKYERFVWKEAKVGFKNSQIPDTGIITKYSRAYLNSYFNRVESVKGGMVAEFRKIWGLQPSFIKDGKKYYEEKDRSKHTHHTIDAITIACMTKDKYDVLANAWTKEDNENGNEARKLLSESKPWPTFTEDLQKIEGEILVSHHTPDNVKKQSKKIVRVRGKKQYIAEIERDINGKAVAKKDGNGKIIYKLDCNGKKLPRIQQGDTIRGSLHQDSIYGAIKNPLNTTEIRYVIRKDLESLKANDIENIVDEIVKEKVKQAIANKVLLLSSNTQQKNKMSGTVWMNEEKQIPINKVRIYANSVKNPLEIKEHSLLSKSKHEHKQKVYGVNGENYAMAIYEGQDKKGNLKRGFELLNYMDAGNYYKLSNDSKNHNTIVPAIHLKLDLPLKYIIKKGDLVLFYEESREELSEVGDKEFMKRLYKVIGFEGDGRIQFRHHKTAMQQSSANKEELTIVKFMADNNLKNSQVDFDTPVPWLRLRVSNCDFLLNDKEFKINPLGKVAIL

SEQ ID NO: 762 - protein, 1371 aa, Streptococcus dysgalactiae
MDKKYSIGLDIGTNSVGWAVITDDYKVPSKKFKVLGNTDRHSIKKNLIGALLFDSGETAEATRLKRTARRRYTRRKNRIRYLQEIFSSEMSKVDDSFFHRLEESFLVEEDKKHERHPIFGNIVDEVAYHEKYPTIYHLRKKLADSTDKADLRLIYLALAHMIKFRGHFLIEGDLNPDNSDMDKLFIQLVQTYNQLFEENPINASRVDAKAILSARLSKSRRLENLIAQLPGEKRNGLFGNLIALSLGLTPNFKSNFDLAEDAKLQLSKDTYDDDLDNLLAQIGDQYADLFLAAKNLSDAILLSDILRVNSEITKAPLSASMIKRYDEHHQDLTLLKALVRQQLPEKYKEIFFDQSKNGYAGYIDGGASQEEFYKFIKPILEKMDGTEELLAKLNREDLLRKQRTFDNGSIPHQIHLGELHAILRRQEDFYPFLKDNREKIEKILTFRIPYYVGPLARGNSRFAWMTRKSEETITPWNFEEVVDKGASAQSFIERMTNFDKNLPNEKVLPKHSLLYEYFTVYNELTKVKYVTEGMRKPEFLSGKQKEAIVDLLFKTNRKVTVKQLKEDYFKKIECFDSVEISGVEDRFNASLGTYHDLLKIIKDKDFLDNEENEDILEDIVLTLTLFEDKEMIEERLKTYAHLFDDKVMKQLKRRHYTGWGRLSRKLINGIRDKQSGKTILDFLKSDGFANRNFIQLIHDDSLTFKEAIQKAQVSGQGHSLHEQIANLAGSPAIKKGILQSVKVVDELVKVMGHKPENIVIEMARENQTTQKGQKNSRERMKRIEEGIKELGSQILKEHPVENTQLQNEKLYLYYLQNGRDMYVDQELDINRLSDYDVDHIVPQSFIKDDSIDNKVLTRSDKNRGKSDDVPSEEVVKKMKNYWRQLLNAKLITQRKFDNLTKAERGGLSELDKAGFIKRQLVETRQITKHVAQILDSRMNTKYDENDKLIREVKVITLKSKLVSDFRKDFQFYKVREINNYHHAHDAYLNAVVGTALIKKYPKLESEFVYGDYKVYDVRKMIAKSEQEIGKATAKRFFYSNIMNFFKTEITLANGEIRKRPLIETNEETGEIVWNKGRDFATVRKVLSMPQVNIVKKTEVQTGALTNESIYARGSFDKLISRKHRFESSKYGGFGSPTVTYSVLVVAKSKVQDGKVKKIKTGKELIGITLLDKLVFEKNPLKFIEDKGYGNVQIDKCIKLPKYSLFEFENGTRRMLASVMANNNSRGDLQKANEMFLPAKLVTLLYHAHKIESSKELEHEAYILDHYNDLYQLLSYIERFASLYVDVEKNISKVKELFSNIESYSISEICSSVINLLTLTASGAPADFKFLGTTIPRKRYGSPQSILSSTLIHQSITGLYETRIDLSQLGGD

SEQ ID NO: 763 - protein, 1458 aa, Fluviicola taffensis
MTKTILGLDLGTNSIGWALINQDFDNKKGEILGMGSRIIPMTQDIKDEFGKGNSISQTAERTRLRGVRRLIHRTLLRRERLHRVLNIIGFLPEHYANQIDFEKRFGKFKPESEPKISFDGNDVFLFEKSYQEMLVDFKIHQPQLVSNGKKIPHDWTIYYLRKKALSKKIEKEELAWILLNFNQKRGYYQLRGEEEEETPNKLVEFHSLKIVEVNADEPQKGKPEIWYSLVLENGWVYRRASKTPLFDWKDKIREFIVTTEINNDGTVKTDKEGTEKRSFRAPKPEDWTLQKKKTEFELSKSGNEVGAFIYESILQKPNQKIRGKLISTIERKFYKEELKTILKTQLFFHKELKDEKLYNACIEELYKNNEAHRSLLSNKGFEHLFINDILFYQRPLRSKKSQISNCPLEKRTYKKEGIEITEGIKVISKSNPIYQEFRLWQWISNLSLYCIEPTETNVTSTFLNSIEDYENLFEFLNNRKEIEQKHLLKYLLENQGFKGKLLTNELEKFRWNFVADKKYPCNETGSLLHTRLSKVKNISPDFLTKEIEHQLWHIIYSVTDKIEYEQALKTFARKNNLDVDSFFEHFKKIPPFESTYGAYSEKAIKKLLPLIRLGKYWNWEAIDSISKDRISKILSGEYDENIKNRVREKAVHLTSENNFQGLQEWLAKYIVYDRHSEGNDLGKWTSVSDLETYLKEFKQHSLRNPIVEQVITETLRVVKDIWIKHGKGTENFFDEIHVELGREMKNNSEDRKRLTNTITENENTNLRIKALLMEMMNDNDVENVRPYSPSQQEILKIYEDGALNSNIELDDEIVKISKKAEPTKSELQRYKLWLEQKYRSPYTGQVIPLNKLFTSEYEIEHVVPQSRFFDDSFSNKVICESAVNKRKDNQLGLQFIKNHSGEKVELGFGKVVQVFTEEQYLDFVKEHYSKNRSKHNKLLLEEIPEKMIERQLNDTRYISKFVSSILSNIVRSEKDDDGLNSKNILPGNGKITTELKRDWGLNDVWNDLILPRFERMNTITNSDLFTTYNDKYQKHLPTVPFEYSKGFQKKRIDHRHHAMDALVIACATRDHLNLMNNQSAKSELKRYDLQNKLRKKEPYFNQKENKQKEAFKDFIKPWGTFTEDSKNALEKIIISFKQNLRVINKATNSYESYKDEDGNLRIGKDGKPEKGLIKQKGLNWAIRKPLHKDTVSGQINLSRIKLPNGKILTATRKNLDTSFDLKTIENSITDTGIQKILKNYLLSKESPELAFSPEGLEEMNNEIEKYNNGKFHHPINKARIYELGSKFNVGQTGNRRDKFVEAAKGTNLFFAIYQDENKNRSYETIPLNEVIEHQKWRASLPKEEQEKIPLVPVNKLKGTFIFSLSPNDLVYVPSNDELERSASIDFSKLKKEQINRLYKMVSSSGSQCFFVKSEVATSVVNKMEYSSLNKMEKSIDNLMVKEICIKLKIDRLGNISKA

SEQ ID NO: 764 - protein, 1037 aa, Parvibaculum lavamentivorans
MERIFGFDIGTTSIGFSVIDYSSTQSAGNIQRLGVRIFPEARDPDGTPLNQQRRQKRMMRRQLRRRRIRRKALNETLHEAGFLPAYGSADWPVVMADEPYELRRRGLEEGLSAYEFGRAIYHLAQHRHFKGRELEESDTPDPDVDDEKEAANERAATLKALKNEQTTLGAWLARRPPSDRKRGIHAHRNVVAEEFERLWEVQSKFHPALKSEEMRARISDTIFAQRPVFWRKNTLGECRFMPGEPLCPKGSWLSQQRRMLEKLNNLAIAGGNARPLDAEERDAILSKLQQQASMSWPGVRSALKALYKQRGEPGAEKSLKFNLELGGESKLLGNALEAKLADMFGPDWPAHPRKQEIRHAVHERLWAADYGETPDKKRVIILSEKDRKAHREAAANSFVADFGITGEQAAQLQALKLPTGWEPYSIPALNLFLAELEKGERFGALVNGPDWEGWRRTNFPHRNQPTGEILDKLPSPASKEERERISQLRNPTVVRTQNELRKVVNNLIGLYGKPDRIRIEVGRDVGKSKREREEIQSGIRRNEKQRKKATEDLIKNGIANPSRDDVEKWILWKEGQERCPYTGDQIGFNALFREGRYEVEHIWPRSRSFDNSPRNKTLCRKDVNIEKGNRMPFEAFGHDEDRWSAIQIRLQGMVSAKGGTGMSPGKVKRFLAKTMPEDFAARQLNDTRYAAKQILAQLKRLWPDMGPEAPVKVEAVTGQVTAQLRKLWTLNNILADDGEKTRADHRHHAIDALTVACTHPGMTNKLSRYWQLRDDPRAEKPALTPPWDTIRADAEKAVSEIVVSHRVRKKVSGPLHKETTYGDTGTDIKTKSGTYRQFVTRKKIESLSKGELDEIRDPRIKEIVAAHVAGRGGDPKKAFPPYPCVSPGGPEIRKVRLTSKQQLNLMAQTGNGYADLGSNHHIAIYRLPDGKADFEIVSLFDASRRLAQRNPIVQRTRADGASFVMSLAAGEAIMIPEGSKKGIWIVQGVWASGQVVLERDTDADHSTTTRPMPNPILKDDAKKVSIDPIGRVRPSND

SEQ ID NO: 765 - protein, 1383 aa, Bifidobacterium angulatum
MGRKVAAEDYAISLDIGNGSVGWAAFTPDYRLVRAKGHELIGARLFEPAQTAEARRMARTTRRRISRRRWRLRLLDALFDAALSEIDPSFLMRRKYSWVHPNDTNNAERWYGGILFDSKDQDKRFYEKYPTIYHLRRALMEDNEQHDIREVYVAVHHILKYRGNFLIEGELDSSDVFVTKKLLNLVKNIINQTSENELEESWALNVDEVKFADALCTTRGSRKMRADNALALIQNACDLTKEQIALVKAILSGLEGNKLDLNKIFPLEGRSSEDQKALSVYFNKADYEETRAKISDSGLLGDDECAFLDELQEQYSAVALKQLLGDSTSISESMCESYDHHRKNWELIKKELRTEDNAEEINRHYGAIVGWEIVDGQRKSIRSSNEDKRKKANKYFADLIGNSSLNESIKRALEHDIEEDQLFPIQRNSDNGVIPYQLHLNELRQILHNQGEYYPFLLDTFEKNGKKVNKIEGLLTFRVPYFVGPLVEQTDMQSSDNAENHWMKRKKAGTITPWNFDEMVDKDLSGRRFIDRLVDTDSYLLGEPTLPKNSMLYQEYEVLNELNNVRLRARSGSHWSDKRRMRLGHEEKAVLLDLFKQHGTVTKNAAENALRRKYGCTFELSGLSDEKKFTSSMSTYNKFSRIFGKEYVREHFDLMEQIVELQTVFEDKETLWHQLSLLDGLSDRDCDLLCKTHYTGWGRLSKKLLTTRVGECKLGNDFAPQKHSIIEIMRAEDRNFMEIITDKELGFSEWIDAQNLGVDKNQTLESVVDELRISPKVKRGIIQSIRLIDDISKAVGKVPSRIFMELADDIQASVRTTSRKNFLLNLYKNSGLKKEFSDIFERLESTDDKELQDDRWFLYYTQLGKDMYTGKELNIDRLSSDYDIDHIIPQAVTQNDSLDNRVLVSRAANARKADSFAYLPELVSARKNFWQELLDNHLISPIKFERLTRQNDFGTHERDRFVQRSLVETRQIMKNVATLLRKRYGNSSSVIGLNAELTKEMRHYLGFGHKNRDINDYHHAQDALCLGIAGQFAVNRGFFDNGMVSDGAKNSYNRYLQDYLKGYRDQLKAGDRKHGRAFGFVVGSMASSDENKRVNPKTGEIVWTEHDKEYLRRVMNYRKMLVTQKVGDNFGPLYNETRYGAGVKEGRDGIAFGKNKADTSLYGGFSSAKVVYSVLIELKKKVQLVNITMQEYAILGDRPSDDALRNVLVAKKKEYSKARFLLRHIPQMQLIRYNNAYMVIKSATELNNARQLWIDHRVYDALDDYLKKGVSRNGVDTVTVWDMLFKAVEKGYPLHVIERNVLDDARVKFMELSLAEQIDVLGLIVIALHADPRRANLRIVGLPSEWKRIRSVSFSDNDEFIFQSPSGLFEKRVTVAELRRKAK

SEQ ID NO: 766 - protein, 1354 aa, Flavobacterium psychrophilum
MKKILGLDLGTNSIGWAFINEAENEIEVSSIVNTGVRIVPLTTDEESDFKKGNTISINADRTLKRGARRGLQRFKQRREALLETFNRIKFIATDFVYAETGAATTFSSYQLRAKSAVEAVTKEELVKVLLMLNKKRGYKSSRKAKTAEEGDAIDGMKIAKEIFENNLTPGQWVYNSLSKGGKFIPDFYHSDLQKELEKIVRFQNQFHSEQINDKLLADIQGKSRTQTSQHFSKTLNIPLAENKGTREETKLQHYQWRNEALANELDMKILAFIITEINNQINQSSGYLGAISDRSKELYFNQETVGQYQYKQLQENVHAKLKNQVFYRQDYLDEFEKIWETQAKFHSELNEKLKAEIRDITIFYQRKLKSQKHLVSFCEFEKGHKAIPKSSPLFQEFRIWQNLNNVVVKNETTKEVFELSEELKQLIAEELQFKESMTDVQMLTFCELKKGTHTVNFKKIEGNRTNTSIYKAFEKILEVEGYEIDFSKMKPLEIKETVAPIFETLNINTVILDFDPTIQGNDFDKQPYYQLWHLLYSAEDDDKLKETLKTKFGFKENHLPFILNINLQADYGSLSAKAIKKILPHLMDGHIYDKACLMVGYNHSSSLTTAQNNDRVLKDTLELLKKNSLRNPVVEKILNQMINVINAIMKDPAMGKPDEIRVELARELKANNEQRKKATSDINTATTEHERIRKLLHSEFNIPRVTRNDIIRYKLWLETGGISLYTGNPIKASDLFSKNYDIEHIIPKSRLFDDSFSNKTLCERQLNIDKSNKTAYSFLQEKLSENDFAAYENRVKDLFKTGKIKSYTKYKKLLMADNEIPEGFIDRQLRETQYIAKKAKEILLEVSRNVTATIGSVTDKLRQDWELVDVMKELNWEKYDKLGLTHIEEGKNGERLSKIKDWTKRNDHRHHAMDAITVAFTKPAYIQYLNNLNAKTQGENKANSIIGIENKHLYRDKNNKLRFISPMKNFREEAKKQLESILISYKAKNKVVTKNKNTTKKSGGTNQKIQLTPRGRLHKETVYGKLQQYATKEEKVNASFTEDYIQKVAKKEYREALLKRLEENDNDPKKAFTGKNALNKTPIYISLKDNIIVPEKVKTVWLETDYTIRKDITPDLKIDKVIDVGIKRILQNRLNEFNGDPKKAFVNLGESPIWLNKEKGIAIKRVTISGVSNAQALHTKKDHLGNEILDKNGNPIPVDFISTGNNHHVAIYRDEKGNLQEEVVSFYDAVIRRNLGLSVINKNHEKGWEFLFSMKQNEFFIFPSDGFNPHEIDLLNPNNYHLISPNIFRVQKISTKNYMFNHHLETKAVDGEMLKSKKELSKTSYHFIQTPTNLNGIIKVRINHLGKIVHLGEY

SEQ ID NO: 767 - protein, 1370 aa, Lactobacillus wasatchensis
MKKRNYNIGLDIGTSSIGWTIVDDNAQIMRAKGKNGYGVRIFAEGKTAADRRGFRTTRRRLKRRKWRLRLLQEFFEPYILPIDENFFMRQKESNLVPQDPNKHFKGSILFNDRTDQEFHEQYPTIYHLRYALMTEHRQFDVREIYWAIHHIVKYRGHFLNSTLASKFKGGELRLADKFESLNKLFLRVQAETGFELSEDNVDKIKTVLLDNGKSRLDRQREVLKIVYLTSEDKDTEKKRKAVATEFIKAVLGLKTKLFIVLAKNPTAETDWKFSFDAEDIDDKLDSISEQLTDDDHEIVELISEIHSIITLTGVVPEGMGLSESMIAKYDQHQLDLKKLKSLMRDLDVKQARKLQDAYDEYIDGLKPSEEAFYSAVSSVIQKMDDPRAKKITAEIELEEFMPKQRTKANGQIPHQLHQQELDQIIENQKEYYPWLAEENPNKREHNAAPHKLDGLVTFRVPYYVGPLIEASVQQKTSNSNFAWMERKVKNDTSRITPWNFEEKVDRNASAENFIKRMTTKDTYLLNEDVLPQQSLLYQRYEVLNELNNVRVNDKKLENNCKQDVYKDLFKNNTTVSIKKFKDYLVANCEYADNPKIEGLADESIFLSSLSTENKFKDIFGAQIDDPNYFEDFEHIIEWATIFEDNKILRAKLDEISWLNESQKKELAKLRMRGWGRLSRKLIAEITDENGSRIIDLLWEHMDNFMVVVNQDVFKEKIVAENKQVFKELNPLDIINEQFTSPQNKKALRQILLVVADIQKAMNGVTPSNIFIEFAREDERNPRRSIQRLRQVENMYRDISDTVLADPEVRNELSNIKNTELARDRVFLYFLQGGRDVYTGEPLNIDKLSEYDIDHILPQAFIKDNSLDNRVLVSASLNRSKSDSVPLDDFTSEMFGRKMEPLWEQMQRAGLISKKKLANLKFNPENINKYTRNGFINRQLVETRQVIKLAANILKDHYGEETEIVNVKAGLTHQFRKDFDFPKNRNVNNYHHAFDAYLTALVGTYLLKKYPKLESYFVYGKFKKGDGITNLKNFNFLHGFNKPGKIINKETGEILFDRDKQLGYMNSIYDLRKVIVTHELSTRHGAMYDQTLYKASDDKDSGRGGKQLIRKKDNLPTEIYGGYTGSTDAFMSIIRMKKKDKLYYKVIGVPTRVAHEVLQSDGKINIFTLNKFIEQKLTKEKVNKKTGAITRITDWFELVIAKVMYGQVIDDGGQPFMLGSSTLPYNVRELYLAKDLVKVINKGSTSKSSYLDVYDELVKSLNKYFPMYDRNMFRQKITDARDKFEKLPKRDKVSNGKLQQIGQVTIIDRILIGLHTNAGVSNLKDLGIATPFGFMQQGNGISLTSTAKIIYQSSTGLFEKSKALDDLNPLA

SEQ ID NO: 768 - protein, 1435 aa, Capnocytophaga sp.
MKNILGLDLGTTSIGFAHIVEDENKEKSEIKELGVRIVSLATDEQSDFEKGKSISTNANRTLKHGARLNLDRYQQRRKFLIDLLQKANLITSASILAENGKNTTHSTWQLRAKAVTERIEKEEFARVLLAINKKRGYKNSRKTKTEDEGQAIDGMAIAKCLYDENLTPGQLSLQLLQQNKKLLPDFYRSDLQKEFDLVWNLQKQFYPDILTDSFYKELQGKGKDATSKAFSKRYHFDTAENKGSKESVRLQAYQWRAEAISKQLSKEEVAYVLTEINNNLNNSSGYLGAISDRSKELYFNRQTVGQYLYAQLQENRHNSLKNKVFYRQDYLDEFERIWETQASFHKELTDELKKQIRDVVIFYQRKLKSQKGLVSFCEFESKEIEIEKDGKAITKSIGARVVPKSSPLFQEFKIWQILNNVTCKRKGIRKKKSSAKSTELDLFNEPSQSIFSLDMECKQLLFDELNLKGDLKSDKVLKLLGYSPQEWEINYNQLEGNRTQKSLYEAYLKIIEIEGYEVKDILQIKSTKDDWSLDESPLSASEIRERVKVIFQTLGICTKILYFDPLLPVKEFEQQYSYQLWHLLYSYESDDSTSGNETLYRILEKKYAFKREHATILANVALQDDYGSLSTKAIRKIYPYIKENQYSTACELAGYKHSKLSLTTEELEARELKNIIPLLKKNALRNPVVEKILNQMINVVNALIEKNSERDAEGKITKYFHFDEIRIELARELKKNAQERYEMTQNINKAKLEHQKISEKLQKQFGIKNPTKSDIIRYRLYQELEHNGYKELYTNTYIAPDVLFSKNIDIEHIVPKARVFDDSFSNKTLAFKEFNIKKGESTAFDYITSLNCEGELNQYLTRVENAYKTKSISLTKYKNLLKKASEIGDGFINRDLRDTQYIAKKAKEILFQVTKNVLSTSGSITDRLREDWGLVDVMKELNMPKYQSLGLTEVEERKDGNKVTVIKDWTKRNDHRHHAMDALTVAFTKPSYIQYLNHLNARKDENNKNYSVILAIEKKETIKVPINNGKNKRVFIEPILNFRQVAKKHLEEIFISHKAKNKVVTKNINKPAGTDKQQITLTPRGQLHKETIYGKYQYYVNKEEKVGVKFDERTITKVSNPLYREALLKRLQANDNDPKKAFAGKNALSKNPIYLDEAKTKTLPEKVNLTYLEEDFSIRKDISPDNFKDLKSIEKVIDQGVKRILIKRLQAYDNDPKKAFVDLEKNPIWLNKEKGIAIKRVTISGVSNAQPLHIGKDHLGKTTLNKEGKEVPVDYVSTGNNHHVAIYRDKEGNLQEQIVSFFEAVVRAQQGLPIIDKNYKQAEGWQFMFTMKQNEMFVFPNEATGFNPAEIDLLDPKNKKLISPNLFRVQTISIVKYGNSVVRDFKFRHHLETTLQDDKILQGITFQQIKSLEPLRNIVKVRINHLGDIVNIGEY

SEQ ID NO: 769 - protein, 1152 aa, Lactobacillus salivarius
MEDMERYHIGLDIGTSSIGWAVIGDDFKIKRKKGKNLIGVRLFKEGDTAAERRGFRTQRRRLNRRKWRLKLLEEIFDPYMAEVDKYFFARLKESNLSPKDSNKKYLGSLLFPDISDSNFYDKYPTIYHLRRDLMEKDKKFDLREIYLAIHHIVKYRGNFLEKVPAKNYKNSGASIGFLLEEVNDLYGNIIGNEDVAILDNDKFEDVEKIILNDEIRNIDKQKNVGRLLVKDKKEKNIVTAFSKAIFGYKFNLEDLLLIESDEKNKLTFNDENIDDIFNELSHSLNDNQMDLLTKTREIYFKFKLNMIVPTGYTISESMIEKYEMHKAHLKMYKEFINTLNAKDRKILKNAYSDYINNEKAKAANAQENFYKTVKKTIKENDSDTAKKIIGLIDEGNFMPKQRTGENGVIPHQLHQIELDRIIENQAKYYPWLAEENPVEKNRKFAKYKLDELVTFRVPYYVGPLIDKTESNKNEKETKFAWMVRKAKGTITPWNFENLVDRTESANRFIKRMTSKDTYIIGEDVLPASSLLYEKYKVLNELNNIKVNKKKLDVEQKQHVYLDLFTTRKNVTKDDLATSLNCDVESITGLTDNKKFNSSLSSYIDLKAILGNIVDDYSKNEDLEKIIEYSTIFEDGNIYKEKLSEISWLTDEQIEKLSNIHFKGWGRLSKKLLTQITNENGERIIDTLWNTSNNFIQVISDESIQAKLAEINGEYANKYNLEDILDEAYTSPQNKKAIRQVMKVVEDIEKAMKCEPTSIAIEFTREKRKSKLTNTRYKKISETYEKITDELISEYELGKLQSELDSKVNNMRDRYYLYFMQLGRDMYTGEKMNIDELHQKYDIDHILPQSFIKDDSLNNRVLTSKSVNIKEKSDKTAADLYAAKMGDFWRKLRKQGLMTEQKYKNLLTRTDSINKYTKQSFIKRQLVETSQVVKLAANILQDKYRNTKIIEIRARLNSDLRKKYELIKNREVNDYHHAIDGYLTTFVGQYLYKVYPKLRSYFVYDDFKKLDSNYLKHMDKFNFIWKLEDKKAEDVYDKVNDEFVLNVPEMKEYIRKIYNYKYMLVSKEVTTKNGAFYDQTKYNAKTINLIPIKKDKPTNIYGGYKGKVSSYMMLVKIQKKKEVIYKFVGVPRLWTDELDRLIDTDEKKALLKK

SEQ ID NO: 770 - protein, 1391 aa, unidentified
  source 1..1391: note = [Eubacterium] yurii subsp. margaretiae ATCC 43715
MENKQYYIGLDVGTNSVGWAVTDTSYNLLRAKGKDMWGARLFEKANTAAERRTKRTSRRRSEREKARKAMLKELFADEINRVDPSFFIRLEESKFFLDDRSENNRQRYTLFNDATFTDKDYYEKYKTIFHLRSALINSDEKFDVRLVFLAILNLFSHRGHFLNASLKGDGDIQGMDVFYNDLVESCEYFEIELPRITNIDNFEKILSQKGKSRTKILEELSEELSISKKDKSKYNLIKLISGLEASVVELYNIEDIQDENKKIKIGFRESDYEESSLKVKEIIGDEYFDLVERAKSVHDMGLLSNIIGNSKYLCEARVEAYENHHKDLLKIKELLKKYDKKAYNDMFRKMTDKNYSAYVGSVNSNIAKERRSVDKRKIEDLYKYIEDTALKNIPDDNKDKIEILEKIKLGEFLKKQLTASNGVIPNQLQSRELRAILKKAENYLPFLKEKGEKNLTVSEMIIQLFEFQIPYYVGPLDKNPKKDNKANSWAKIKQGGRILPWNFEDKVDVKGSRKEFIEKMVRKCTYISDEHTLPKQSLLYEKFMVLNEINNIKIDGEKISVEAKQKIYNDLFVKGKKVSQKDIKKELISLNIMDKDSVLSGTDTVCNAYLSSIGKFTGVFKEEINKQSIVDMIEDIIFLKTVYGDEKRFVKEEIVEKYGDEIDKDKIKRILGFKFSNWGNLSKSFLELEGADVGTGEVRSIIQSLWETNFNLMELLSSRFTYMDELEKRVKKLEKPLSEWTIEDLDDMYLSSPVKRMIWQSMKIVDEIQTVIGYAPKRIFVEMTRSEGEKVRTKSRKDRLKELYNGIKEDSKQWVKELDSKDESYFRSKKMYLYYLQKGRCMYSGEVIELDKLMDDNLYDIDHIYPRSFVKDDSLDNLVLVKKEINNRKQNDPITPQIQASCQGFWKILHDQGFMSNEKYSRLTRKTQEFSDEEKLSFINRQIVETGQATKCMAQILQKSMGEDVDVVFSKARLVSEFRHKFELFKSRLINDFHHANDAYLNIVVGNSYFVKFTRNPANFIKDARKNPDNPVYKYHMDRFFERDVKSKSEVAWIGQSEGNSGTIVIVKKTMAKNSPLITKKVEEGHGSITKETIVGVKEIKFGRNKVEKADKTPKKPNLQAYRPIKTSDERLCNILRYGGRTSISISGYCLVEYVKKRKTIRSLEAIPVYLGRKDSLSEEKLLNYFRYNLNDGGKDSVSDIRLCLPFISTNSLVKIDGYLYYLGGKNDDRIQLYNAYQLKMKKEEVEYIRKIEKAVSMSKFDEIDREKNPVLTEEKNIELYNKIQDKFENTVFSKRMSLVKYNKKDLSFGDFLKNKKSKFEEIDLEKQCKVLYNIIFNLSNLKEVDLSDIGGSKSTGKCRCKKNITNYKEFKLIQQSITGLYSCEKDLMTI

SEQ ID NO: 771 - protein, 1507 aa, Flavobacterium branchiophilum
MLQIYKTFLNVYSEKTFFLKYFFQYIYKKYENTKMAKILGLDLGTNSIGWAVVERENIDFSLIDKGVRIFSEGVKSEKGIESSRAAERTGYRSARKIKYRRKLRKYETLKVLSLNRMCPLSIEEVEEWKKSGFKDYPLNPEFLKWLSTDEESNVNPYFFRDRASKHKVSLFELGRAFYHIAQRRGFLSNRLDQSAEGILEEHCPKIEAIVEDLISIDEISTNITDYFFETGILDSNEKNGYAKDLDEGDKKLVSLYKSLLAILKKNESDFENCKSEIIERLNKKDVLGKVKGKIKDISQAMLDGNYKTLGQYFYSLYSKEKIRNQYTSREEHYLSEFITICKVQGIDQINEEEKINEKKFDGLAKDLYKAIFFQRPLKSQKGLIGKCSFEKSKSRCAISHPDFEEYRMWTYLNTIKIGTQSDKKLRFLTQDEKLKLVPKFYRKNDFNFDVLAKELIEKGSSFGFYKSSKKNDFFYWFNYKPTDTVAACQVAASLKNAIGEDWKTKSFKYQTINSNKEQVSRTVDYKDLWHLLTVATSDVYLYEFAIDKLGLDEKNAKAFSKTKLKKDFASLSLSAINKILPYLKEGLLYSHAVFVANIENIVDENIWKDEKQRDYIKTQISEIIENYTLEKSRFEIINGLLKEYKSENEDGKRVYYSKEAEQSFENDLKKKLVLFYKSNEIENKEQQETIFNELLPIFIQQLKDYEFIKIQRLDQKVLIFLKGKNETGQIFCTEEKGTAEEKEKKIKNRLKKLYHPSDIEKFKKKIIKDEFGNEKIVLGSPLTPSIKNPMAMRALHQLRKVLNALILEGQIDEKTIIHIEMARELNDANKRKGIQDYQNDNKKFREDAIKEIKKLYFEDCKKEVEPTEDDILRYQLWMEQNRSEIYEEGKNISICDIIGSNPAYDIEHTIPRSRSQDNSQMNKTLCSQRFNREVKKQSMPIELNNHLEILPRIAHWKEEADNLTREIEIISRSIKAAATKEIKDKKIRRRHYLTLKRDYLQGKYDRFIWEEPKVGFKNSQIPDTGIITKYAQAYLKSYFKKVESVKGGMVAEFRKIWGIQESFIDENGMKHYKVKDRSKHTHHTIDAITIACMTKEKYDVLAHAWTLEDQQNKKEARSIIEASKPWKTFKEDLLKIEEEILVSHYTPDNVKKQAKKIVRVRGKKQFVAEVERDVNGKAVPKKAASGKTIYKLDGEGKKLPRLQQGDTIRGSLHQDSIYGAIKNPLNTDEIKYVIRKDLESIKGSDVESIVDEVVKEKIKEAIANKVLLLSSNAQQKNKLVGTVWMNEEKRIAINKVRIYANSVKNPLHIKEHSLLSKSKHVHKQKVYGQNDENYAMAIYELDGKRDFELINIFNLAKLIKQGQGFYPLHKKKEIKGKIVFVPIEKRNKRDVVLKRGQQVVFYDKEVENPKDISEIVDFKGRIYIIEGLSIQRIVRPSGKVDEYGVIMLRYFKEARKADDIKQDNFKPDGVFKLGENKPTRKMNHNQFTAFVEGIDFKVLPSGKFEKI

SEQ ID NO: 772 - protein, 1375 aa, Lactobacillus ruminis
MRKNQEPYNIGLDIGTSSIGWSIMNDNFDLMRVKGKKGIGVRLYNEGQSAAERRMHRTARRRYGRRKWRLRLLEDFFDEHMAEVDDTFFARLKDSNISPKDDKKYRKSLLFPKSKGVTYQDDGEFYKKYPTMYHLRYALMTEHRKFDLREIYLAFHHMVKYRGNFLYDTSVDSFEAKNLDIKGKFDEINDLLSSYTDFYVDNSNAALVESILLEKNTTRKDKSKKIAKLLHVEDKEKGKNKKAKDLATQISNAVLGLKCNFHLIFELQQKYSFDLCSEKTEENIAKLSEVLDENQKMLLMILKEVQDQVMLNAFVPSGMSLSEAMMQKYDDYGEQLKIYHELEHSVSDDSAAKLRGAYRDYNDNIIKRIDGDNKKDTFYKRVKNILTKISKEYVDQDVLESCGKLKKLIDENKLFIRQRTAANGVLPHQLHQIEMRKIIDNQKEYYPWLAEPNPNEKRRVYSKYKVEELIAFRIPYYVGPLVDPNNADKNKEARFSWMVRKKDGEITPWNFYDKVDWAESANNFIERMKSKDTYLLGEDVVPKESMLYQKYEVLNELNNLRINDSGLSDSFEDVKLKQAIYNDLFKKQKIVKITDLQNYLVQNHKYLVKPKISGLADENRFLSSLSTYSDLKTIFGDKVDDRTYFNDFEKMVEYSTVFEDGHDYNQKLDEYTWLTKEEKYKIGKKRYRGWGKLSKKLLTGLRDKNNHTIMDNLWETNRNFMQIQTADEFSKQIAEENERHLKGSVSDAINDMYTSPANKKAIRQVLRVVDDIQKAMGYAPSSISLEFAREDGPSVRTVSRANRMKSIYEKYASEVSEEVMKDLDGVIKDKKGLNDRLYLYFEQQGKDMYSGHPLDFDKVISGQEYDIDHILPQAVIKDDSLDNRVLTTKALNNDVKSKGVPCRMFNGMHSFWKNLYDKGFISRRKFNNLTTNPENIDKYKMKGFVNRQLVETRQIIKLVANVLNDKYQNDDVDIIEVRAELTHDVRKHFKFYKNRNVNDYHHAFDAYLTSFIGHYLFKKYPNLRPLFDYNDFMKVSDNVFKQLRGNNFLGEFLNKTGDIISTDGNFVLNKEEMINKLNKAYAFKKILVTKEVGQRTGAMFNETRYPAPNSRKAALKYRRMPKPDSLISVKDYKNTDIYGGYSGKNDAYMVIVDMGKQYMVVGVPVRYTEKLDKLRIKHSELYRDELRKVLSRDKTLLDSKGNVKRFDIVLDRVLYGQLIEDGNELFTLGSSKYKRNFRQLFLDKQCIEILDSSATPQPTDEELIWVYDQILDKVDKYFELYDINRQRETLRKGRAAFCSLPNISMKKDDVTKKKILNEILVALHANESESNCEKIGKKVFGRLQVPGGIKLSKEAKLIYQSPTGLFERVVYLKDL

SEQ ID NO: 773 - protein, 1646 aa, Francisella hispaniensis
MNIKILPIAIDLGAKNTGVFSAFYQKGTSLESLDNKNGKVYELSKDSYTLLMNNRTARRHQRRGIDRKQLVKRLFKLIWTKQLNLEWNKDTQQTISFLLNRRGFSFITDGYSPEYLNIAPEAVKAILMSILDDYNGEDDLDSYLQSATENDSKIDELYNKLLQKALEFKLRKLCIDIKEDKVTTKTLKELSNTEFKLLANYLVDYDRILRTQKFSYTDKQGNLRELNYYHHDKYNIQEFLKRNIIINDVILEKLTDDLDIWNLNFDKFDFEKNLEKLENQEDKDYLQTHLHHFVFAVNKIKSEMASGGRHRSQYFQEITNVLVENNHQEGYLKNFCENLHNKKYSNLSVKNLVNLIGNLSNLELKPLRKYFNDKIHAKADYWDEQKFAETYSDWILGEWRVGAKDKDKKDGAKYSYKNLCDELKQKVGINQDGIINQTKSDFVDFLLELDPCRTIPPYLDNNNRKPPKCQSLILNPKFLDNKYPNWQQYLQELKKLQTVQNYLGNFEIDLKDLKSSKEQPYFVKYKSLNQQIASGQRDYKDLDARVLQFIFDRVKASDELLLNEIYSHAKKLKQNTSSELEKLELCKKLDEVIANSQLSQILKSQHVNGIFEQGTFLHLVCKYYKQRQRARDSRLYIMPEYRYDKKLDKYNNTGRFDDDNQLLTYCNHKPRQKRYQLLNDLAGVLQVSPNFLKDKIGSDDDLFISKWLVEHIRGFKKACEDSLKIQKDNRGLLNHKINIARNTKGKCEKEIFNLICKIEGSEDKKGNYKHGLAYELGVLLFGEPNQASKLEFDRKIKKFNSIYSFAQIQQIAFAERKGNANTCAVCSADNAHRMQQIKVAKPVEGNKDNIILSAKAQRLPAIPTRIVDGAVKKIATILARNIVDDNWDNIKQALSNNQQLHVPIITESNAFEFEPALADIKGKSLKDKRKKALERIDPENVFKDKNNRIKEFAKGISAYSDANLANGDFDGAKEELDHIIPRSHKKYGTLNDEANLICVTREDNQNRGNKAVFLYDLKPNYKLKQFNTTDDLEIEKKIADTIWDASKQDFKFGNYRSFINLTPQEQIAFRHALFLADKNPIKKAVIRAIDNRNRTFVNGTQRYFAEVLANNIYLRAKKENLATNRITFDYFGIETTNSNGRGIADVRKLYEKVDSDIQAYAKGDKPQDSYSHLIDAMIAFCVAADEHKNEGSIGLKMGNQYGLFPTPDKYDENTGEIISWHNDDIFRKIKVSDNQFSDKKLVRKKATEGFNTHRQMTRDGIYGESYLPILIHKNLNEVRKGYNWENSEEIKIFKGKKYDIQQLNNLVYCLKFVDKPISIDIQITTLEELRNILETNNISTTAEYYYINLKTQKLHEYYIENYNTALGYKKYTKEMEFLRSLAYRTERVKIKSIDDVSMILAKDSNFKAGKIELPFKTEWQRLYLEWQNTTIKDNHEFLKSYFSVKNATKQHKKVRKDFSLPISTNEGKLLVKRKTWDNNFIYQILNDSDSRADGTKPFIPAFDISKNEIVETIIKSFTSKNIFWLPKNIELQKVDNKSIFAIDTSRWFEVETPKDLIEIGVSTIQYKIDNNSRPKVRVKLDYVMDDDSKINYFMNHSLLKSRYPDKVLEILKQSTIIEFESSGFNKTIKEMLGMTLAGIYNETSNN

SEQ ID NO: 774 - protein, 1339 aa, Enterococcus faecalis
MKKDYVIGLDIGTNSVGWAVMTEDYQLVKKKMPIYGNTEKKKIKKNFWGVRLFEEGHTAEDRRLKRTARRRISRRRNRLRYLQAFFEEAMTALDENFFARLQESFLVPEDKKWHRHPIFAKLEDEVAYHETYPTIYHLRKKLADSSEQADLRLIYLALAHIVKYRGHFLIEGKLSTENISVKEQFQQFMIIYNQTFVNGESRLVSAPLPESVLIEEELTEKASRTKKSEKVLQQFPQEKANGLFGQFLKLMVGNKADFKKVFGLEEEAKIKITYASESYEEDLEGILAKVGDEYSDVFLAAKNVYDAVELSTILADSDKKSHAKLSSSMIVRFTEHQEDLKNFKRFIRENCPDEYDNLFKNEQKDGYAGYIAHAGKVSQLKFYQYVKKIIQDIAGAEYFLEKIAQENFLRKQRTFDNGVIPHQIHLAELQAIIHRQAAYYPFLKENQKKIEQLVTFRIPYYVGPLSKGDASTFAWLKRQSEEPIRPWNLQETVDLDQSATAFIERMTNFDTYLPSEKVLPKHSLLYEKFMVFNELTKISYTDDRGIKANFSGKEKEKIFDYLFKTRRKVKKKDIIQFYRNEYNTEIVTLSGLEEDQFNASFSTYQDLLKCGLTRAELDHPDNAEKLEDIIKILTIFEDRQRIRTQLSTFKGQFSEEVLKKLERKHYTGWGRLSKKLINGIYDKESGKTILDYLIKDDGVSKHYNRNFMQLINDSQLSFKNAIQKAQSSEHEETLSETVNELAGSPAIKKGIYQSLKIVDELVAIMGYAPKRIVVEMARENQTTSTGKRRSIQRLKIVEKAMAEIGSNLLKEQPTTNEQLRDTRLFLYYMQNGKDMYTGDELSLHRLSHYDIDHIIPQSFMKDDSLDNLVLVGSTENRGKSDDVPSKEVVKKMKAYWEKLYAAGLISQRKFQRLTKGEQGGLTLEDKAHFIQRQLVETRQITKNVAGILDQRYNAKSKEKKVQIITLKASLTSQFRSIFGLYKVREVNDYHHGQDAYLNCVVATTLLKVYPNLAPEFVYGEYPKFQAFKENKATAKAIIYTNLLRFFTEDEPRFTKDGEILWSNSYLKTIKKELNYHQMNIVKKVEVQKGGFSKESIKPKGPSNKLIPVKNGLDPQKYGGFDSPVVAYTVLFTHEKGKKPLIKQEILGITIMEKTRFEQNPILFLEEKGFLRPRVLMKLPKYTLYEFPEGRRRLLASAKEAQKGNQMVLPEHLLTLLYHAKQCLLPNQSESLAYVEQHQPEFQEILERVVDFAEVHTLAKSKVQQIVKLFEANQTADVKEIAASFIQLMQFNAMGAPSTFKFFQKDIERARYTSIKEIFDATIIYQSTTGLYETRRKVVD

SEQ ID NO: 775 - protein, 1145 aa, Riemerella anatipestifer
MKTILGLDLGTNSIGWALVKETENSNEKSEIIKLGVRVNPLTVDEKTNFEAGRPLSTNADRTAKRSARRNLQRYKLRRKNLIDLLIKHRLIDKDTPLTEIGKNTTHQTLELRAKAARERIELEDLARVFLAINKKRGYRSSRKVNNEEEGQVVDGMAVAKKLYDENLTPGQYAYELLSKGKKYVPDFYRSDLQAEFDSIWEYQKQFYADILDDELYNALKGQGQQNSRKRFLAIKGVYTAENKGKRDEVKLQHYKWRSEAITQKLSIEEVAYVLVEINNDLNKSSGYLGAISDRSKELYFNKETVGENLWKQIQKNPHTSLKNQVFYRQDYLDEFEQIWETQAQFHPQLTLALKEQIRDVVIFYQRKLKSQKGLLSFCQFESWEIERKDENGNVILNKTTQLPKRQTVGRRVAPKSSPLFQEFKIWQNINNLEIAKISDGNSKNKKETEALSDDERKLLFEELNLRGNLSQKEVLQILGLKDKEYKTNFPEGLEGNRTNAALFNIYQQIAENEGYGDWTKKSAQEIKEELKAVFPQIGIQADILDFNAELDGKEFENQASYQLWHLLYSAEEDDKINEEDQIIYGNSAVSLKKKLCEKFGFTPEYAKWIANVSLQDDYGNLSTKAMRKIIPYLIDGNDYSEACALAGYNHSNSLTKEENDNRERLNKLELLPKNSLRNPVVEKILNQMVNVVNQVIETYGKPDEVRIELARELKKSAEERAEMTKGINEATRRNEDIKKLITKNFGIPNPTKNDVVRYRLWEELAPLAYKDVFTGRQIKKEDLFSSKIDIEHIIPKALLFDDSFSNKTLAFRETNLKKADRTAYGFIESDYNATLDDYIQRVETLYNNAKGTISKGKRNKLLMAQKNLPDGFIERDLRNSQYIAKKAKSMIEKVFNDVNVTSGSITDRLREDWDLINVMKELNFPKYKALGLTEIEERYDIGQEKTKKVEVITDWTKRNDHRHHAMDALTVAFTTKSHVQYLNNLNTIHSLKGDEVDLELSKLYGLKNTITEVVNKKRKFIPPMPNFREEAKKHIETILVSIKNKNKVYTKNINKTKKESGYHTKEQLTPRGQLHKETVYGKSKRPMNKPTKINKNFSLEQAQLIINVQEKELVLRHLAQFDNNPAVAFDTKTLKKCHYLKMVNL

SEQ ID NO: 776 - protein, 1158 aa, Barnesiella viscericola
MKNILGLDLGSSSIGWAVIHEDDTHGELVTMGSRIVQLSPDELSSFTQGNGVSVNAQRTQARGQRRGYDRYQLRRALLVEKLRELDMLPDVSLTGLPKLELWGLRARAVTERIGLRELGRVLFHLNQKRGYKSTKSDFSGDKKTTDYVKTINNRYDDLQAAGLTVGEHLYRELSANPFYRCKEQVYPRRAYVEEFDRIMACQQAYYPSLLTDEQIRCLRDEIIFYQRPLKSCKHLVSVCEFEKRRYVNAAGKEVEAGPKVAPRTSPLFQLCRMWESINHIVVRNRQNEILEISLEQKNQILAFMNTHEKLRITNLLQLLGLPKSGGYRFGDQFKAGIQGNKTRIDIATALGDYPDKERLLQFNVREISSSMVDEETGEILPIIDPSFEQEPLYRLWHVLYSIDDRDQLQAVLRRQFGIDDEEVLARLSALDFVKAGFGNKSSKAMRRILPFLRLGLNYADACAAAGYNHSNSMTKAENEARELLDRIPAIRKNELRQPVVEKILNQMVNVVNALMAKYGRFDEIRVELARELKQSKEQREKSYKSMLSTQRENERIAARIAEYGVVTRSRIQKYKLWEETDHCCIYCGQPVDVHDFLQGFGVEIEHIIPKSLYFDNGFANKVCACRRCNSEKGNSTAYDYMSHKGASLFQAYVDRVNDLKSRNKISENKMKNLLTKVENIPDDFIARQLKESQYIARKSRELLSMVCCQVTATSGSVTDFLRHTWGWDTVLHDLNLPRYREAGRTEIKEVQHKDKEQIVGWTKRLDHRHHAIDALTIACTKQGYIQRLNNLSALGKKAEGEEAASGSENGSQNLERYIQAQPHFSVAQVREAADRILISFKAGKKSVTPGKRYIYKNGKRVVAQRGLLVPRGALSEESVYGVVRLWEKDDRGNRVQVQRAVLKYPVTSIDSKSLDKVFNKGIREILSNRLEQYGNDPKKAFATPVYSDAEGRRPIRTVRCLARPAVDTLVPLRYDRDGKPIAWVNPGNNHHVAIYRDEAGKYREQVVTLWNVVDRRRAGLPAIITDPRAVWDSVLQRTDLPEPLLKSLPDVKWQFVLSLQQNEMFVLGMSDEDFRYAMDHHDYALLNKYLYRVQKVSKGDYFFRFHVETMVDDKYDGKTNMALSIRMGKLKRVSVKSLLSLNPYKVHLSVLGEIDEVL

SEQ ID NO: 777 - protein, 1063 aa, Staphylococcus microti
MEKDYILGLDIGIGSVGYGLIDYDTKSIIDAGVRLFPEANADNNLGRRAKRGARRLKRRRIHRLERVKSLLSEYKIISGLAPTNNQPYNIRVKGLTEQLTKDELAVALLHIAKRRGIHNVDVAADKEETASDSLSTKDQINKNAKFLESRYVCELQKERLENEGHVRGVENRFLTKDIVREAKKIIDTQMQYYPEIDETFKEKYISLVETRREYYEGPGKGSPYGWDADVKKWYQLMMGHCTYFPVEFRSVKYAYTADLYNALNDLNNLTIARDDNPKLEYHEKYHIIENVFKQKRNPTLKQIAKEIGVNDINISGYRVTKSGKPQFTSFKLFHDLKKVVKDHAILDDIDLLNQIAEILTIYQDKDSIVAELGQLEYLMSEADKQSISELTGYTGTHSLSLKCMNMIIDELWHSSMNQMEVFTYLNMRPKKYELKGYQRIPTDMIDDAILSPVVKRSFKQAIGVVNAIIKKYGLPKDIIIELARESNSAEKSRYLRAIQKKNEKTRERIEAIIKEYGNENAKGLVQKIKLHDAQEGKCLYSLKDIPLEDLLRNPNNYDIDHIIPRSVSFDDSMHNKVLVRREQNAKKNNQTPYQYLTSGYADIKYSVFKQHVLNLAENKDRMTKKKREYLLEERNINKYDVQKEFINRNLVDTRYTTRELTTLLKTYFTINNLDVKVKTINGSFTDFLRKRWGFKKNRDEGYKHHAEDALIIANADYLFKEHKLLKEIKDVSDLAGDERNSNVKDEDQYEEVFGGYFKIEDIKKYKIKKFSHRVDKKPNRQLINDTIYSTRVKDDKRYLINTLKNLYDKSNGDLKERMQKDPESLLMYHHDPQTFEKLKIVMSQYENEKNPLAKYFEETGQYLTKYAKHDNGPAIHKIKYYGNKLVEHLDITKNYHNPQNKVVQLSQKSFRFDVYQTDKGYKFISIAYLTLKNEKNYYAISQEKYDQLKSEKKISNNAVFIGSFYTSDIIEINNEKFRVIGVNSDKNNLIEVDRIDIRQKEFIELEEEKQVNYMNSDSYLKNNRIKVTIGRKTTNIEKFHTDILGNMYKSKRPKAPQLVFKKG

SEQ ID NO: 778 - protein, 1422 aa, Prevotella denticola
MTQKILGLDLGTNSIGSSVRNLDLSDDLKGQLEFFSSDIFRSSVNKESNGREYSLAAQRSAHSRSRGLNEARRRKLWATLDLLIKYGFCPMSPESLMRWRTYDKQRGLFREYPIDDKDFNAWILLDFDGDGKSDYSSPYQLRREFVTRQFDFDQPIERYKLGRALYHIAQHRGFKSSKGETLSQQETNSKQSLTDEATDVAGEMKASEEKLSKGLSTYMKENNLLTVGAAFAQLEDEGVRVRNNNDYRAIRSQFQREIETIFKFQQGLSVENELYERLVSEKKNIGTIFYKRPLRSQRGNVGKCTLERTKPRCAIGHPLFEKFRAWTLINNIKVRMSEEEQAEQLPMKLRFELYNDCFLAFVRAEFKFADIRKYLEKRLGVHFSYNDKTINYKDSTSVAGCPITARFRKILGEDWESFRVDGQKQRQAHGKNNASFHRVSYSIEDIWHFCYDAEEPEAVLSFAQDNLKWEKKKAEELVRIWSAMPQGYAMLSQKAIRNINKMLILGLKYSDAVLLAKVPEIVEITDGEILSVTEDYHRVEAQVGYEKQINNIVNALIAKYKSASEEYRFADHNYEYQLDKSDEKDIIKQIESNIGTRKWSLLDADEQTDILQKVRDKYQNFFRSHERKFVESPKLGECFEEYLMKKFPMVEGERWKKLYHPSQIAIYRPVPANKDRSALRLGNPDIGAIKNPTVLRVLNTLRKRVNQLLDDGIISPDETRVVVETARELNDANRKWALDTYNRIRHDENEKIKKILAEFYPKRDNISTVDIDKARYVIDQREMDYFTEAKTYHKDIKKYKLWLEQGGQCMYTGRTINLSNLFDPNSFDVEHTIPESISFDSSDMNLTLCDAHYNRFIKKNHIPADLPNYDKSVVIDGKEYSPIKPRLQRWADRVERLNRNVEYWRGQARRVQNKDRKDQCMREMHLWKMELEYWTKKLERFTITEVTDEFKNSQLVDTRVITRHAVLYLKSIFPHVDVQRGDVTAKFRKILGIQSVDEKKDRGLHSHHAIDATTLTIIPGAAKRERMLELFAKIEEVNKMLSFSGNEDRTGLKQELDGLKNQLNKEVKACRIGHNVSEIGTFINDNIIINHHVKNQALTPVRRRLRKRGHIVGGMDNPRWQTGDALRGEIHKASYYGAITQFAKDKDGKVLLKEGHPLVDPTIKFVIRRELKYKKSTADSGFASWDDLEKAIVDKELFALMKGQFPEETSFKDACEQGIYMIKKGKNGEVDTKLYRIRHIRCKTKQKNALKIKEQAYKSEKEYKRYFYAAVGDLYAMCCYTNGKTREFKIYSLYDISCHRKVGVEDIPEFITDKKGNRLMLDYKLHTGDMILLYKENPEELYDLDNVSLSKLLYKINGFENDGLRIRMVNHLVAKEAMGESVKDYAKLPDIIRCGVKTIKFLVMGENRDFVIKNGKISFNHR

SEQ ID NO: 779 - protein, 1059 aa, Rhodovulum sp.
MGIRFAFDLGTNSIGWAVWRTGPGVFGEDTAASLDGSGVLIFKDGRNPKDGQSLATMRRVPRQSRKRRDRFVLRRRDLLAALRKAGLFPVDVEEGRRLAATDPYHLRAKALDESLTPHEMGRVIFHLNQRRGFRSNRKADRQDREKGKIAEGSKRLAETLAATNCRTLGEFLWSRHRGTPRTRSPTRIRMEGEGAKALYAFYPTREMVRAEFERLWTAQSRFAPDLLTPERHEEIAGILFRQRDLAPPKIGCCTFEPSERRLPRALPSVEARGIYERLAHLRITTGPVSDRGLTRPERDVLASALLAGKSLTFKAVRKTLKILPHALVNFEEAGEKGLDGALTAKLLSKPDHYGAAWHGLSFAEKDTFVGKLLDEADEERLIRRLVTENRLSEDAARRCASIPLADGYGRLGRTANTEILAALVEETDETGTVVTYAEAVRRAGERTGRNWHHSDERDGVILDRLPYYGEILQRHVVPGSGEPEEKNEAARWGRLANPTVHIGLNQLRKVVNRLIAAHGRPDQIVVELARELKLNREQKERLDRENRKNREENERRTAILAEHGQRDTAENKIRLRLFEEQARANAGIALCPYTGRAIGIAELFTSEVEIDHILPVSLTLDDSLANRVLCRREANREKRRQTPFQAFGATPAWNDIVARAAKLPPNKRWRFDPAALERFEREGGFLGRQLNETKYLSRLAKIYLGKICDPDRVYVTPGTLTGLLRARWGLNSILSDSNFKNRSDHRHHAVDAVVIGVLTRGMIQRIAHDAARAEDQDLDRVFRDVPVPFEDFRDHVRERVSTITVAVKPEHGKGGALHEDTSYGLVPDTDPNAALGNLVVRKPIRSLTAGEVDRVRDRALRARLGALAAPFRDESGRVRDAKGLAQALEAFGAENGIRRVRILKPDASVVTIADRRTGVPYRAVAPGENHHVDIVQMRDGSWRGFAASVFEVNRPGWRPEWEVKKLGGKLVMRLHKGDMVELSDKDGQRRVKVVQQIEISANRVRLSPHNDGGKLQDRHADADDPFRWDLATIPLLKDRGCVAVRVDPIGVVTLRRSNV

SEQ ID NO: 780 - protein, 1053 aa, Sphingomonas sp.
MSGMVFGIDLGIASCGWAVLRQPQRDGDPGEIVDLGSWMFDVPETDKERTPTNQVRRGNRLLRRVIRRRAQRMVEIRRLFHDHGLLAGHAPEALKRAGLDPWDLRARSLDKVLEPAALAVALGHIAKRRGFKSAARRKEANTAGDDQKMLKALEATHERLGRYRTIGEMFARDPDFESRKRNRDGMFDRTQGRDDLLHEVGEIFKAQRRLGSALATAELEQAFTAIAFRQLPIQDSERLVGLCQFEPKEKRAARFAPSFERFRLLQRLTNLRVVTVEGERPLTADEIAAAAADLGRTAKLSVKEVRKRIGLAADHRFAAFKADEEDRDIIARTGEALHGTYRLRKALGEGLWAEMLPGQLDAIAHALSFFETQDVILKELDKLDLPAGVRDAIATGLDAGAFARFKGTGHISARAARALLPHLEAGLRYDQACTKAGYDHAASRWAKREQVADKAAFNRLVTDMGAEIANPIARKSLTEALKQLWAMRNRWGLPDAIHIELARDVGNSLEKRREIERAIEKNTAARERERGEARDLLGIDDVSGDTLLRYRLWKEQAGRCPYTDAPIPPGAIIATDNSFQVDHILPWSRFGDDSFANKVLCATAANQRKKGQTPCEWITAAQGEEGWATFVARIEGNAAFRGPKKRNYVLKNAKEAEERFRARNLNDTRYAARLLAEAVKLFYPEGERQDKGGVRRVFTRPGGLTAALRHAWGVEALKKRDGKRVDDARHHALDALVVAAIGEGEVQRLTRSYQEWEQQGLARPLRRVDPPWGDFHSFRREVKDAYDGIFVARPERRRARGEGHAATIRQVRERDGAAVVFERKAIADLSEKRLADIKDPERNQAIVEAIRQWIVDGRPADRLPRSPAGDEIRKVRLRTKGKPAVQVRGGAADRGEIVRVDVFTKPNKKGKNEFYLVPIYPHQVMNKAEWPTPPMRAVVAYKDESEWTLLDENFGFLFSLFPRSYVEVTKPGGEVLSGYFQGMDRSTGAISLFNHRDSRSLTDDSGNSTRGIGAKTLLTMKKYSVDRFGKRAEVKSEVRTWHGVACTYPTPPG

SEQ ID NO: 781 - protein, 1509 aa, Bacteroides vulgatus
MKNIVGLDLGTNSIGWAVVNGSVNDDGSEQLVKIQASGSRIIPMDAAMIGDFNKGNSISQTAERTRLRGVRRLSERYLLRRERLHRILDILGFLPFHFAQDLDRHGKIVKGKEPKLAWRKNEAGQFEFIFQDSFKEMLEDFKLNHPNLITDDKKVPYDWTIYYLRKKGLTSKISKEELAWILLNFNQKRGYYQLRGEEEKKNDNVMIINSKVIDVVKAEKDKKYEKYWYNVLLENGLLYRAAFYNDISFWKGHTKEFVLKTIKLKSGGTKQELSFLPSFDEIEKMEKKQKDKMYFKIKLKTEADIDQAHKTVGTYIYDTLLGNPSQKIRGRLVRTIERKYYKEELKLILDKQKEFHPELQDRALYAACIEELYPINEAHRNNVGNRDFTYLFLEDILFYQRPLKSKKSLIDNCPYEENQGLDKETGEIKSFPVKCIAKSHPLFQEFRLWQFIVNLRIYRKDLAQDVDVTNELLKTEEDYVALFDWLNGKKEIDQKAFLKYPVFGLKKEIENYRWNYVQDKPYPCNETRLLMLARLEKCDISIEFLTKENEEALWHILYSVEDKNEIVKALQKFADKHDLNASFVDVFRKFPPFKKEYGSYSAKAIKKLLPLMRMGKYWSEDSIDKGTRKRMDKIITGEYDEKIENRVREKVIHLADVSDFRGLPLWLVCYIVYGRHSEAKEITQWKSPADIDSYLKSFKQHSLRNPIVEQIIIETLRVVRDIWKQVGNIDEIHVELGREMKNPADKRKKMTQQMSENENTNLRIKYLLTEFLNPEYEVENVRPYSPSQQDILRIYEEGVLNSVSDLPEEISDILKKFTETDLKKRPSRSEILRYKLWLEQKYRSPYTGEVIPLGKLFTPAYEIEHVIPQSCYFDDSFSNKVICEAEVNKLKSNLLGHEFIVKHHGEIVELPFGKKVRIFTVDEYEQFVKDNYSRTRGKMKKLLMDDIPEEFVARQLNDSRYISKVVKSLLSNIVREKGEEEAISKNVIPCTGGVTDRLKKDWGINEVWNKIILPRFQRLNELTGTNKFTTKNVGIQEIPTMPLELQKGFNKKRIDHRHHAMDAIIIACANRNIINYLNNESATAKAELSRYDLQKLLCDKAKTDNNGNYKWVIRKPWASFTQDTYLALENIIVSFKQNLRVINKATNRFLHYNEEGKKIFVKQGKGDNWAIRKSMHKDTVFGEVNLRRIKTVALNEAMKNPQSIVVKDFKRKLLELWNLGFDAKRIKKYFEDNRETWSDINLSKIEVYYFSKDTKDRFFATRKPLDTSFDRKKIENNITDTGIQKILLRHLELKDNNPDIAFSPDGIDEMNRNIIQLNNGKYHQPIIKIRWYEQADKFAVGQTGNKFSKFVEAAKGTNLFFAVYESNILDKKTNTIIKKRNYATIPLNVAIERQKQGLPVAPEDENGNDPIFVLSPNDLVYLPTDDELANGIIAQPLDRGRIYKMVSCTGNEGHFIPARIANPILQTIELGSNNKAQKAWTDEMIKEICMPIKVDRLGNVLESSSSYKK

SEQ ID NO: 782 - protein, 1047 aa, Mannheimia sp.
MKLLRYILGLDLGIASVGWAIVEIDENDFPIRLIDIGVRTFDKAEVSKTGESLALARRLARSTRRLIRRRAFRLLKGKRLLKQHNVINKEALTTLPTDCWALRVKGLDERLSPTEWSAVLLHLLKHRGYLSQRKNEAKSADKEMGALLSGVASNHQLLVENQFRTPAEIAVKKFALEEGHIRNQLGAYTHTFNRLDLLAEMKLLFQTQRELGNPHTSGQLEQEFCELLMWQKPALSGDAILKMLGKCTFETNEYKAAKHSYTAERFVWLTKLNNLRILEHGSERVLNTDERSLLLNQPYEKAKLTYTQVRKLLGLSEEARFNGVRYGKEKAEDATLIELKAYHAIRKAVEKADKSAWETLKNQTALLDEIGTTFSIYKTDDDITEQLNGKLSDTVLNALLENLNFDKFIQLSLKSLYNIVPLMEQGLRYDEACQQIYGDHFGKKSGEINRLLPPIPADEIRNPVVLRSLTQARKVINAVIRLYGSPARIHIETARELGKSYKDRKEIEKRQEQNRAEREKATAQFKTLFPTFIGEPKGKDILMMRLYEQQNGQCLYSGKPLNLNRLLEKGYVEIDHSLPFSRTWDDSQNNKVLVLAGENQNKGNQTPFEWLGKDEHQWALFVARVNGCRFPYAKKQRILTQKLDEQGFIERNLNDTRYIARFLVNFVRENLHLTGKGKNRVFASNGQITAFLRGRWGLSKVREESDRHHALDAVVVACSTVAMQQKITRFVKYQEGNLQTAERIDRETGEIIPLHFPDPWHFFRQEVMIRIFSENPQEDLIIQLPDRPEANHEFVQPLFVSRMPTRKMSGQGHMETIKSAKRLDEGISVSKVPLTQLKLKDLDNMVNREREKALYEALKARLNAFNDDPTKAFAEPFYKKGGQQVKAVRVEQVQKSGVVVRNGNGVADNASMVRVDVFIKGGKYFLVPIYTWQVAKGILPDRAVVAAKDESEWELMDKTAQFLFSMFPNDLIQVKTKKETFFGYYNGLDRATGAINLKEPDSNINKGKSGLHRSIGVKTALSVEKYQVDELGKNIRPCRPSKRQAVR

SEQ ID NO: 783 - protein, 1391 aa, Galbibacter marinus
MKTILGLDLGTNSIGWALVKEAENENEVSDIIKLGVRVNPLTVDELTNFEGGKAYSNNAERTLKRGARRNLQRYKLRRENLIEILLKNGLINKDTALTEVGKETTHQTLKLRSKSANEKVSLEDLAKILLSINKKRGYKSSRKVNAEDDGVAIDGMEVAKLLYDENMTPGEYVLRLLESGKKHLPDFYRSDLQEEFNLVWKKQSEFYPLILTKELFFELHGKNKSQTWAICKEPLGIVGVKLKGSAKEQKFARYRLRKEALTQQIELEHLAIVLQDINNDSNKSSGYLGAISDRSKELFFNKETVGQYQYKQLQKDPNTSLKNQVFYRQDYLDEFEVIWRNQAKFYPQLTNELKQEIRDVVIFYQRKLKSQKNLISFCQFESTQQNYVEKETGKTKIRTIGRRVIPRSSPLFQEFKIWQSLNNLKFVNSESNQIIQFIELEDDVKKVVFDELNLRGDLKPNQVLKILSKYMKIGKLTQWKCNLEEIEGNRTNSALYNVFQMIAEEEGYGFNWGKKSALEIKSELKAIFSSIGINDSILDFDFSKKLDQQLSYQLWHLLYSAEEGNSKITEEDKFTYGNTGVALKKKLHLKFGFKPEYSTLISNLRFTSDYGNLSSKAISKILPFLRDGSDYSKACQYAGYNHSNSLSADELDNRELKPKLELLKKNSLRNPVVEKILNQMVNVVNQVIDNYGKPDEVRIELARELKKSAKERSQMTKNISDATRRNAEIKKYLSKEFGIPNPTKGDVIRYRLWEELASNGYKDLFRDKYIPKEKLFSNEIDIEHIIPKALLFDDSFSNKTLAFKVDNLKKADRTAFDFMSTDFSKDVDSYIGRIETLHKDGKISSSKYKKLMIPKSKLVDGFIERDLRNTQYIAKQARKMLLEVFKTVVPTTGKITDKLREDWDLINVMKELNFPKYKALGLTKKIERFDVGSEKIKSINVIEGWSKRNDHRHHAMDALAVAFTTHNHIQYLNYLNARKDIHHEMHGTIKSIENQIIGKDVMGKRRFIPPISDLRMKAKLQIESILISFKNKNKVVTWSVNKTKLKGKDNYNKRRQLTPRGQLHKETVYGKIKLIDPKPLKLNNKFTLVRASMIVDKVHREIVLQHLSKYDNNSEVAFDSKTIKIDPILIEGIGLKEVVCYEDVFKIRKKISGDNFKNEKHLEKVIDEKVKQILKDRVIKFQGNFKEAFSNLEENPIWLNKSKGIAVKSVAIKGVNNAESLHEGKDHFGDQILDKNKKQIPVDFVSTGNNHHVGIYEDKDGNLQERVVSFFEAVTRVNEGLPIIDKTYNSDIGWKFKFTMKQNEMFVFPSDDFDPNEFDLTDGKNAAKISPNLYRVQKIATKNYMFRHHLETVVTNDLEFTYKSIRSTGWLRNLVKVRINHLGEIVYVGEY

SEQ ID NO: 784 - protein, 1337 aa, Fusobacterium necrophorum
MKKFENYYLGLDIGTSSIGWAVTNSQYDILKFNGKYMWGTRLFPEANTAQERRIHRSSRRRLKRRKERIQILQMLFDKEIAKIDSGFFQRLKDSKYYKEDKTEKQTNSIFHDKDYSDKEYHQDFPTIYHLRKFLLEGNKPKDIRFVYLALHHILTHRGHFLFPDMEVSNVTEFSNIFSELKQYLYDEMDLDFEWKNGKLNEVENILKDRNLAKSEKEKKLCGIIELEGKIDNQRKAMIGMMCGCKKKFSDLFQNENYRELEISSFSFADSSYEEKRDELEGILAENILCLDYLKTIYDWGKLSDILQGEESISVAKVKSYEEHQLDLKYLKNILKLYSHKEKENVFRKKEGKYPKYISGKLSQEEFNKSIKKILEEIKSVKQEDRKVFDTLLKRASNNLLCPKQVIKENGVIPYQIHKFELEKILRNMADFFPMLKEKKDGKTLSEKIISVFTFRIPYYVGPLNQNSDRAWLVKNKDEKIYPWNFEEIVNLEESAEKFIQNLTNKCTYLVLEDVLPKSSILYSKFMVLNELNNLKIDGEAISVDLKQKIYLNLFQKYKKVTLKKLKGYLKSENILIDTSTQITGIDGDFKSSLGSYLDFYNILGDKVKTDFGKKLIENCILWITLYTGEKKLLKNKIIANYKGELSEEEIKKIVNLKYKDWGRLSYAFLEEIQSASLETGELRNIIQMMWETNNNLMELLSSNYQFLSEIEKRNSVVAIGKEFNYETILGDSYASPSVKRMIWQSLSVVDEIKKIMKKAPKKIFIEMARQEDMKKERKESRKSTFLTLYKSIKEEGRDWIKEIENWSDSEFRSKKLYLYYTQMGKCMYTGEKISLDQLFNKNIYDIDHIYPRSKTKDDSIENIVLVKRNINAKKTDEYPLERNIQQKQHDFWKMLHSKKLIGDKKYERLTRTTEFTDEELSDFIARQLVETRQSTKIVADILKNLFPETKIVYVKANLTSDFRKNFKILKSRDINDYHHAHDAYLNIVTGNVYNIKFTDNPRNFIKDKKLEGKKYNLKVEKIFEYRKENESFWNPKTMVTKIENYIFKKRPQFTRYSFEQHGGFFDQNIVDKESCKKGTGYIPIKSSNAILYNTSKYGGYGSVTGTYFFLVEHTMKGKRIRTIEMMPLYLSKKIHSKEELEKYCKEKLELQKPSVRLARIKYNSLLKINGFPYHITGKTNDSYWIMSAIQLLLSKNYYEYLRKLYIFCKEERLEEEIVGEKNIKLYTCILEKLEKSIYSHKLLNINYNGKSKNLKDILESEKENFLLLSEKKQAQILIEIFTLLESNNFGANLESFGCGKKCGITKINKNIDKLEEVLLINQSPTGLFENSIDLKKV

SEQ ID NO: 785 - protein, 1262 aa, Treponema pedis
MKTLGLDIGTNSIGWGIVDEKAEKPIIDCGVYLFPEGVKIEKGVESSKAAERTGFRSARRLKFRRKLRKYETLKVLIQNGMCPLSSGELEVWRKEKIYPSSEAFVRWYRTSEAEQYEPYFLRKKCAEQKCTKHEIGRALYHIAQRRGFLSNRKETGKETEGGKVTDAIDELSKVMGEKTLGQYFYELRKTGDRVRGRYTGRKEHYEKEFYTICSVQGLSEELVKQLYRAIFYQRKLKSQKFLVGTCTFEPNKPRCPVSHFEFEEFRMLQFINSIKVAKNIDEDDRQDFVPLTQIEKEIIIPLFYRVSKTKVKFIDIEKKLRGKNKNESWKFNYRSDSNVAGCPVSAGLLHIFGENWKEIKIDNYDSYAIWHVLFDFDDRDKLREFAQTKLHLDDEEKVKSFLNIPIHQGYANLSLKAIKKILPFLREGMLYSHAVFMANIPAIIGQKAFEADKTKIIAGFENIIKAMPEKNREIALVNSCIDRIFKDKTRDFRSEQWNRAILEEQIADMYGKKYWEKKPQAEQQEIRRNAAEKIDDALRIAITNRANDYKYPLLRTDDLLKEYLREQGYTLHEKKELYHPSDIEYGFETPIAAEDGKMYLASPRTKSVKNPVAMRALFQLRKLINHLIKTGAIDSSTKVAVELANEVNDKNMRAAIARFQKENETKNAKYKQAIIETAAEHGFTIEPTDKDIKKYRLWKEQKEECPYTGKKISFTDLFGSMPQFDFEHTVPRSLSFDDSLENLTLCDVHFNRSVKKQQLPSQLAGKEDIIKRIKGYYGEKIDQCRAAIERNKPRGAYIEPSRKDAMIVNRHMAMYELHYYEQKLKRFTLEEIPSGFKNSQLNDTRLITKFALAYLKGVFSSVYPVNGFATDLFKRQWGLLERNEAKDRSYHRHHTIDALTIACINRGKYAALCEAVRNSADGRHLTFAKPWKSFDTDVLTATEYLVPKFYNDDNALRQTKKVIRDTRSGKPILKNGNKQYIQGHTARGSLHKDTFYGCIMTPPEKERKPENIFVERVSVSVLTEKDAEKIVDKGIRKIFIDNLESKIQTIEEIQTQGLLLPYKINGRTTYMKKVRIKVKTTKPLRIKKHPETENRKDYKNYFYAVNDENYLFVLYRGVSDDGKTVSDYRAVNLLDAVHAVQQKKEMYPAEMTKNGTVLKVYKTLKKGKTVILKESEEENIWELPHDAVWKRLYRIAALGVTGSGIQIRLVHCSCAETWVYLKGQGSVSEMMKFRCYNTPGSLVCLVEGCDFVISPDGKIIKK

SEQ ID NO: 786 - protein, 1483 aa, Prevotella sp.
MKTILGLDLGTNSIGWAKVSVDDYGNYLHDIKLGSRIIPMSQDVLGNFDSGVTVSQTAQRTEFRSKRRLVQRNLQRRERLHRVLHVLDFLPAHYDAAIGWDRTEAVTYGKFLNHAEPKLAWEELGNGKRRFLFMDSFHEMVADFARCQPALVADGKKIPLDWTIYYLRKKALTQAITKEELAWILLNFNQKRGYYQLRGEEEEENPTKQEEYYELKVVSVEATDSRKGNDTWYNVHLENGWIYRRSSKISLDDWVGKVKQFIVTTEYEKDGTTLKTDKEGNVKRSFRAPNENDWGLRKKRTETLLEMSGKTVGAFIYDHLLQEPADKIRGNFIRTIERHYYKAELEAILAEQCKYHIELRDKEMLEACARELYLNNLPHQRSLMKKDMTYLLLYDLIFYQRPLKSKKALIANCPYEYYEYVDKETGEIKRQNIKCIAKSNPYFQEFRLWQFVLNLRLFDRVEDKEVTANYLPTADDHARLFTYLNDRKEINQETLLKDYFKLKKVKIGNEKEYPIRWNYIEDKEKKYPCNETRYELLMALDRAGIEHKWLDDNNLEYRLWHLLYSVEVKSESETALRKLKNDDAFVNSFLKVKPFKKEYGAYSEKAIKRLLAVMRKGFLWNEQDICDETRKRIEIIIKGDVDEKVKERMGHAAYSFDRVSDFQGLPEWLACYVVYGRHSEAMDIQRWDSPERLMAYINNFKQYSLRNPIVEQCILETLRTVHDIWKETGQIDEIHVELGREMKSTSEERARRTQNVLRNENTNLRIKSLLIELKNDTDICNVHPYSPMQQEILRIYEEGALQELNREDEDFEEISKISQMSQPSGKELNRYKLWLEQKYRSPYTGKAISLAKLFTPAYQIEHVIPQSRYFDDSFTNKVICEAEVNTLKSNLLGYEFIKKHGGEIIHCTTLGDVRIFSESEYKAFVMDHYANNKSKKDKLLMEDIPQEFLSRQMNDSRYISKVVKTLLSNIVRMADESEATSKSVIVCTGGVTDRLKKDWGLNDVWNSIVYSRFERLNRLTGTEAFGHWENKDGKRVFQTSMPLELQRGFRKKRIDHRHHAMDALVIACASRNIVNYLNNESANNPKKREDLRRQLCDKNRVIRKPWETFTQDAYNALENVVVSFKNYVRVINKATNRYEHYDENGKKRFVQQKGSELWAIRKPMHKETYYGHVNLRRKELVTLQKALDDIPSICDKKLRDYISALVEKHFNKRQLLAHFKSTDYYWQKQYVNKVYVWTFSDDIKPLVATRKLLDTSFDAKRIGTITDTGIQKILRNYLEAKGGNATLAFTPEGIVEMNQNISKYNDGKPHQPILKVRITEPMGAKYRVGQTENKMAKYVEAQSGTNLYFAIYEDSEGKRSYTTVPLDEVAERLKQRLSPVPEKDENDVPLKFYLSPNDLVYVPTEEELQLRECKLNKDRIYKMVSSTGSECHFIPYYVANVIYNKVEFEAKNKIGRALTGEMIKAVCWKLEIDRLGNILKVIK

SEQ ID NO: 787 - protein, 1341 aa, Ruminococcus lactaris
MGKGYYVGLDMGTGSVGWAVTDESYQILRRHGKAMWGVRLFESAKTAEERRMFRTGRRRLDRRGWRIEILQEIFAEEISRVDPGFFLRMKESKYYPEDKRDIQGNCPELPYTLFVDKTFTDKDFHKKYPTIYHLRKMLMETEDTPDMRLVYLALHHMMKHRGHFLLSGDISQVTEFKNTFNQFIENIRNEEMDFEIELDESAVQMIEETLKDKNLTRSAKKSKLVKGLNAKNVRDKAFLTLLSGGTVKLSDLFGMEELNEGERPKISFADNGYEEYAAVVEMELGELYYIVESAKAVYDWAILSDILGGSTSVSDAKVRAYEKHKADLKYLKAVVKEYFPKEVYNAVFVESSDKLNNYPAYIGMTKKNGKKVSLEGKRCSREEFMDFLKKNIVVKLPDEEAKMYLQSELEKDSFLPKQVNKDNGVIPYQVHKYELKKILDNLGDKIPFLKENAEKIEKLFSFRIPYYVGPLRTGNGENSKFAWAERKSTEKIYPWNFENVIDVEQSAENFIRRMTNKCTYLIGEDVLPKDSLLYSKFMVLNELNNLRLDGQKISVELKQKIYRDVFCRSRKVTQKKLKSYLIREGIAGKNVELTGIDGDFKGSLTAYHDFKEKLIDVELTQKEKEEIILNIVLFGDDKKLLKQRLKKKFPQLTEKQINTVTALSYKGWGRLSKKLLEEVTVPAPETGEVWNIITALWETNDNFMQLLSKEYQFSDRIEEFNEEKADPEVSYQTIEDLYVSPAVKRQIWQTLQIIQEIEKVMGEKPKRVFVEMAREKQENKRTESRKKTLSDLYTKCKKEEPEWIEALCTSLEKHEEHQLRSDKLYLYYTQKGRCMYSGEPIDLEDLWDNTKYDIDHIYPQSKTMDDSLKNRVLVKKEYNAKKSDTYPIAADIQKKMMPFWKSLLTGGFIPKEKYDRLVRNNPLDANELAGFIERQIVETRQSTKAVAEILKKILPDTEIVYVKAKTVSKFRQDFDFIKVRDMNDLHHAKDAYLNIVVGNVYFVKFTKNAAWFVKENPGRTYNLEKMFIWDVARDGEIAWKAGKSGSIVQVRAMMEKNHILVTRRSYEVKGGLFDQQILKKGKGQVPVKESDERLRDIGKYGGYNKAAGVYFMLVSSKDKKGKEQRTIEFVPIYLKDRVEKDMESARNYLMEERGLREPKILIKKIKIDTLFKVDGFYMWLSGRTSNQLIFKGANQLILSKEDMKTLKKVVKYIQRQKEDKNVKISMRDGITEEELLKLYETFLDKIRHSIYGARLSSQEKTLVNGKEKFIDLSVEAKCQVLYEILHLFQCQSGAANLKMIGGPASAGILVMNNNISKCKNISIVNQSPTGIYEKEIDLLRV

SEQ ID NO: 788 - protein, 1195 aa, unidentified
  source 1..1195: note = Candidatus Hepatoplasma crinochetorum Av
MQLENKKYLALDIGVTSLGWAISEYNNQKNNWNILDFGVRLWDAPEDSKSLDTKTSERRQFRSGRRLNSRKKIRINDLKKTFYNHKLLKKEDYQNHILKINKEGKKYFKDDKFNSIILRKKGLEEKLTNLELLIALINIAKRRGYSNRFLIPNLNENKDARKSIEKSKELIKKYKYPIKAITEDSFFNFNPKDLSKFNYRSRVFNESKFNEQIFLDKNKKEINIINLQNLLKKYNIDHKNESEKELINILKNTLIKKYNDNQILFNREDYENEFDALLNKQIEYNDKLSDIKEDLKKIIFRQRDFEDGPGPKDPEVKKIWKEKLNKDSKQFYYKQFFENLGNCEFFQDQKRLSCFSIENDISFILNETGKIFSKLKNEKQINSEKIKIITREIFDNYFKNLKFDRKIITEIFSKHNLNLPKLDGISFANSNLFLHSFAQNNENKEFILKNLKIDLNFLNTIRDSKINKIANVLFKNKTPEKLKNELIKIDSFFNDQNDGYNWIRKNNKWIGKGNKTLSTSSKFILSALKNQLDTGEIIFEYQNKIREKNTEEKLEKLKEKEIKLFSPIKDQDMQKNSVVFRAINQVRLVVRDLLKIHNFDGLIIEVAKDLYAEKTLRNKIRSNQDKNQKIREESENKLKEHNLIPTSKNINKYLIWKDQQLDQISKKENFAYDLYDVDFKEKIYLKNFIEDKNNEYQVDHIAPYSLVNDDTKNNKIVTSRKNNALKSNKTPLDFFKIQNFTNKQLNNWKNKIEKSINSNVKLAYLFMENLDRSKETGFESRNINDTRYITKYITDYLKLEFAKKERKENIKSPKILQIQGGITSYFRRLWLNPSNYKYGSLWGDINKPRDISPFHHAVDAIILSNMISEQHIEFYQLIVRIINFYNYYVNKKDSFNIKEKLFEQKRIIDNRFKDRGFVYFYGTKELNNKLNQVFNYLINLIDQKIKTNQRLERIDFTTDQNILNLISPLIENLPSKINNLIPVRLKQINQKYPATTFDSNTNEYIKEIKYKKIPAFLDTIEATEWANLNNKNIKDYPYVSYKIDKRIRGTLLAKQNPSSKKEAIDQKTGKLKNSFIKDKKGNFWDISKYIGYTYDQNKKLIPIYRNQIAEIAKQKEKINLILFKNAQFKLSNDEIIYTYKSLDSLEKRFSAPISNLTQHTNPKKYKEMFNIKLRISISKAQDLKLVNITRLGKIE

SEQ ID NO: 789 - protein, 1143 aa, unidentified
  source 1..1143: note = Hyphomonas
MTAWRLGLDVGSNSIGWAAIELDANGRPCGILKGGNDKQFLPGAGARIFPDGRNPKDKQSLAAQRRVPRGMRRNRDRYLQRREDFLGALVGFGLMPADETERKTLENPTGRKRNQDIEIRKDFDPWCLRARALNETLTPFQIGRALFHLQQRRGFKSNRKADKEAKDGKISKGAVETLARMQERHARTLGELFGRPRLEGNLHASTRARLSGEGTKAFYDFYPTRDLILDEFEKIWQVQATYHPTILTREAYDKLYSILSFQRPLKPQPVGRCTLEPETDLRAPWALPSSQRRRLYETLNAMHYRKPGEAAEWLTSEQRDLLAEKALSKKDLTFDDMRKALKFHGDVKFSIESEKRKKIEGDHTAAILANKNLWGKEWRKLPFAEQEAIVELLLGLEPLTDKTPAQVRQVTEAVIEQAASTFSISRGETKTLLTSSDPAVLAHWLSERYGLSYEIAIDVVDANLPDSHQGLGRRANAKVLAELMADDAPVYSEAVVRSGYRDHRATEGQGEVHDRKLPYYGEVLERSVAFGTGDPRDSLEKRVGKIANPTVHVALNQLRKVVNRLMERYGPPSEVVIELARDLPLGAEDKRKLEREQQDNQNANEQREKILNEYGIRNTYVNRLKLRLFEELTRGKATNGQCLLSGEQFGLAKLLSDEIEIDHILPFAQTLDDGFNNKTLVTRRANRDKARRSPYEAFGTSPSGYDWEEIASRAADLPPQKSWRFSPDAMERYENEERDFLERQLNDTKYIARLTRTYLGAIYGGGDEAVKHVWVTPGRLTSDLRSVWGLNRILDGNKPSDEPDAPSRKNRDDHRHHAIDAIVVALTDRAMLKKAADHANLQNSEVSSERMLAALGEPWKGFREDVERHVNAIVVSHKKDHGIEGQLHEDTNYGVVQNPQGDGQKLATRKPIVSFEKHGQLQYIADNRIREELMERTYGLSGADFKQALHDYVNEQKPGRRTNPRRVRVHKPVTESTPLRQIHHGGIGEYQRGVLAGENYCLDIVETPDGKWHCREISRFDANRLKGSDKAEVPGWMEDNPEALLVMRLRKGDMIAVEDVPGEIEYKRVVRLEPSANRVRLARDREAGDYEKRHTDRDDLFSWDFATISKLKARKARLVHVDEAGRVFDPGLRHAGTDCRNIK

SEQ ID NO: 790 - protein, 1263 aa, Streptobacillus moniliformis
MKYILGLDLGVASIGWAVTEINEKGEPVGLIDANSVIFKPLDNDKGKLYNVERRDKRGSRRILRRKKHRVERTKMLLVNSSFLTNEEIDNLYVGKLDNIYEVRLKGLKEQLSKNEIARLMIYYCKNRGFKSNRKTEDLEILKSLGEKISEKDSDEKKLKPIIAKNTELIESKGLTPIEVIYMIRENDNSILGFKNKEGNYKFGFKRNQVIDEVRKILGTQQILSKEIVDEYIDILSSQRDFSDGPGGDSKYKIDYTKLAGKCKYTGEVRAVKSAPSYEIFTMLQKLNDIRYVKFTSEDKIEKKKLSKEVIHKLYDLVVEKNKTLTYDLIEKSIDEENIKLLNIPKLSKSKYVELRKSYFKERNDNENLTEEEINAFNEKLNNERMKQELIRNNLKAYKELKSKFKKNNIDENRIKELGGIYFLDLVAELLTYSKTDEKLEYFVENVERYSLFKEQRDIVEIIKTFPNYTKNGNLSLSLVRELNKLLMEGHDYESSLSSLNYYIDTDVDWEKFPTISEIEDSLSTKITNPNVKHILVILRKLYNTLLFKYGRPEKVHLELSRDFSNDFSTRNKIQKEQLENKVRREVAAFEMYGANKDIVAGKDRLSNDDFVRIKLWEEQNKVCMYSGRTIEKYQLTSAEVQIDHILPYSKSFDNSYSNKVLVFSNENQDKKERTPYQWLKGTEKWNEFKQRVRLNLNISNKKKENLLFEDEVVNNEFLERELHATSYSSRLALNIFQRLIPVSDEDKYDEHGNEKVKYLYNRNVIAFQGKMTSMLRNLYSLNKYTHSFESDTLDIDNKAFILKEFEINKDNLKMTAYNVNTGLEITSETKVEKNKSGEFKTIKDELLKKELDKKENLIEISDYFKDKVLFDLKIVDFEEIDTVEPEIISILYKMITALKEEVYSKNRENHLHHSLDAFLLTIMNRSMQMKLIKYNQLISVLKNKEIEIFNEEKGEYIDSKEFAEELQKQKIIDIDGNERGIKFNVNGKTHRLNLVKPYENFLDDIKNKIFDKRENNKLPYHVVKSKVSGALHAETILGESKGEITKRISVFDINYKNLGKIFDKDGSQKEIYETLVKWLEAKSKDYPKLKNGNIIKKVKIVDGNKDKLIKLGNKRYVEMGRTTVKILVLKKEAEEGLKFASIGRYKYNLLKSEKDVNISIWKDAIHFCKVRYNKLKENGYRLIHELIPGETIELELNKGNISKCLVVGFSGGKIEISSVIGDALDLINDKISTRIKERYYITVSTIKSIKKINKNILGDWYVI

SEQ ID NO: 791 - protein, 1392 aa, Gemella haemolysans
MANKTWYLGLDIGSASVGWAATDTGYKIIRKNKKRLWGVRLFEEAKTAEDRRGYRSSRRRLARRKWRLNLLEELFTSEVKKVDENFFLRLKESQYHYEDKTHKVPYAIFNDKDYTDKDYYKDYPTIYHLRSKLMTEENPDIRKVFLAIHHIIKNRGHFLLQGQSFKDGNLNNLIKELLELDILHVGFEVTEEVVDKIADISLEKKTSKDKLNDIKELYPKEKQLLEVFRLIFGGKTSLDKLFAIDEYKELDAAIKSVSFKEKIYEEVRHDYEQVLSNYIELLDLAKLVYDSIILSDIKKEGKTLSESKVELFEKHRDDLLKLKNLVKNDSKLSEDKKVELYALIFKEDKDKGTNYVNYIRKSEEGKGCNYEDFKKFLVKELAKLEESSVKTEIIKDLELEQFLPLQRTKDNSVVPYQIHKEELVKILDNAARYHSFLNEKDESGYNVREKVIQLLEFRIPYYVGPLNSSKKAKEGGFAWSVRNTGYENTPVTPWNYSKVIDESASAEKFITNLTNKCTYLKGEDVLPKSSLLYSEFALLNELNALKYDGNRISLEARNTIIEKLFKQQGKKVTKTSIKNLLKAEGYIDGKGEITGIDITVKNDLKSYRDFKKILGNKFNSEHVENIILWITLYGESRKLIKAKIESVYGEVYSKDEITKMSRLVYKDWGRFSRKLLTELVSKKLYNEETGECLNIIGAMRQNNILFMELLADRFDYSKQIVEFNKELQEDVTEIAPEILDDLYVSPAVKRSIWQTVRIVEELKKIIGCAPAKIFVETTRSNQEKKKPTDSRKKQLELAYKAVKKDVKELEKEIGTINFDVLNDRLSSVEPSKLKAKKLYLYYTQLGRCMYSEEPINISELFDNNKYDIDHIYPQSKIKDDSFTNTVLVKRESNAAKTDRYPLGSDIQTPSNRRFWKFLKEKGLISDEKYNRLVRTEEFSDEELSGFIARQLVETSQSVKAVASILGELNPETSICYSKAENVSSFRQNFGKIKKGDRDSKNNDQLIKVREINDYHHAKDAYLNVVVGNVYDTKFTRNVFNFIKDKKDGRKYSLNKVFYENVSDSKTVAWEMDKTIHQVEKVMNNNNIMVTRRTSEQKGGLFDATVYKAKVAAKAKDGVYYPLKTSNSVVKDVAKYGGYTSIGIAYYSIFEYTIVNKKGEEKITRIIPIPIYISQNIKDSTALIEFGKSQIFCRAYEKIKDFKLLYRKLCIGSKININNYQYYIGGKSDERFYYDSAIQVTLDKKSEKYLKILSKYQNWKKENKDGELWENITKENNIELYNKLVEKMNSEIFTKKKSNKYNELNSEEIRNNFIKISVEEQAKVLLEILNLLTNKKSIFDLKSIDIKAARGKISFNLTSLIQFSIIEQSITGFYEKEITIIGDKGNDMENNNS

SEQ ID NO: 792 - protein, 1077 aa, Neisseria bacilliformis
MQQKPQRYILGLDLGIASVGWACVWADENEHPTGLLDCGVRTFERAEVPKTGDSLALARRQARSVRRLIRRRAHRLLRLRRLLKREGVLLSADFNENGLVRGLPIDAWALRVAGLDRKLSNKEWAAVLLHLVKHRGYLSQRKNETQSKDKELGRLLAGVNGNREALQNRSDEYRTAAELAVKKFAAENNGSLRNKGGDYSHTFDRKDLQRELHLLFERQRALDNPFTSSEMEAAVDELLMKQRSALQGEAVLKMLGRCTFEPSEYKAAKNTYSAERFVWLTKLNNLRIQYNGEERALSEAERRLLLDEPYQKAKLTYKQVRTILELPESAVFKGLRYGHGEDGLKAESGTLMEMKAYHAVRKALKDAGLEGEWENRIRNPELLDAIGTAFSLYKTDEDIRANLAAFRLSENVLEALLAGLNFDKFVHLSLKALAKILPLMEQGMRYDEACKEAYGDHYGAKEQEDHRLLPPFVADDIRNPVVFRTLTQARKIVNEIVRRYGSPLRVHIETGREVGKSFSDRKEIEKRQEENRKERERAAAHFKELFPNFAGEPKAQDILKLRLYEQQHGKCLYSGKEIDLRRLPEKGYVEIDHALPFSRTWDDSFNNKVLVLGKENQDKRNRTPYEYLDGKGNSGAWRAFAERVSGCRFPYAKKQRLLTQKLDEKTEQGFLERNLNDTRYVARFLCQFIEEKMHLEGAGKKRVFASNGQITALLRGFWGLKKVREENDRHHALDAVVVACSSVSMQQKITRHFRYREELEHIDRETGEVIHGFPQPWEFFRQEVMTRVFSDDPVSELAEKLDSRPEAVHEFVTPLFVSRAPHRKVTGQGHLETIRSAKRLDEKISVVKLPLTQLKTKDIERIVGYPNREPALYDALAARLAAFKDDPAKAFSEPFYKTGKDGKCGVLVKAVRVENVQKSGLLVRKDESGKMQGVADNATMVRVDVFGKNGKNYLVPVYAWQVEKGELPNRAVVAYADEEDWDEMDDSFEFKFSLYPNDLVEVVTKKDKFFGYYSGFNRATGAINIKEHDLSKSKVKNGVYEGIGVKTAQSFQKYQVDTLGKTIRLCKPEKRMGFKKK

SEQ ID NO: 793 - protein, 1155 aa, Streptococcus dysgalactiae
MDKKYSIGLDIGTNSVGWAVITDDYKVPSKKFKVLGNTDRHSIKKNLIGALLFDSGETAEATRLKRSARRRYTRRKNRIRYLQEIFSSEMSKVDDSFFHRLEESFLVEEDKKHERHPIFGNIVDEVAYHEKYPTIYHLRKKLADSTDKADLRLIYLALAHMIKFRGHFLIEGDLNPDNSDMDKLFIQLVQTYNQLFEENPINASRVDAKAILSARLSKSRRLENLIAQLPGEKRNGLFGNLIALSLGLTPNFKSNFDLAEDAKLQLSKDTYDDDLDNLLAQIGDQYADLFLAAKNLSDAILLSDILRVNSEITKAPLSASMIKRYDEHHQDLTLLKALVRQQLPEKYKEIFFDQSKNGYAGYIDGGASQEEFYKFIKPILEKMDGTEELLAKLNREDLLRKQRTFDNGSIPHQIHLGELHAILRRQEDFYPFLKDNREKIEKILTFRIPYYVGPLARGNSRFAWMTRKSEETITPWNFEEVVDKGASAQSFIERMTNFDKNLPNEKVLPKHSLLYEYFTVYNELTKVKYVTEGMRKPEFLSGKQKEAIVDLLFKTNRKVTVKQLKEDYFKKIECFDSVEISGVEDRFNASLGTYHDLLKIIKDKDFLDNEENEDILEDIVLTLTLFEDKEMIEERLKTYAHLFDDKVMKQLKRRHYTGWGRLSRKLINGIRDKQSGKTILDFLKSDGFANRNFIQLIHDDSLTFKEAIQKAQVSGQGHSLHEQIANLAGSPAIKKGILQSVKVVDELVKVMGHKPENIVIEMARENQTTQKGQKNSRERMKRIEEGIKELGSQILKEHPVENTQLQNEKLYLYYLQNRRDMYVDQELDINRLSDYDVDHIVPQSFIKDDSIDNKVLTRSDKNRGKSDDVPSEEVVKKMKNYWRQLLNAKLITQRKFDNLTKAERGGLSELDKAGFIKRQLVETRQITKHVAQILDSRMNTKYDENDKLIREVKVITLKSKLVSDFRKDFQFYKVREINNYHHAHDAYLNAVVGTALIKKYPKLESEFVYGDYKVYDVRKMIAKSEQEIGKATAKRFFYSNIMNFFKTEITLANGEIRKRPLIETNEETGEIVWDKGRDFATVRKVLSMPQVNIVKKTEVQTGALTNESIYARGSFDKLISRKHRFESSKYGGFGSPTVTYSVLVVAKYQSYKMEK

SEQ ID NO: 794 - protein, 1015 aa, Helicobacter canadensis
MQNKKGLIMKVLGFDIGINSIGWAFVENNELKDCGVRLFTKAENPKTKESLALPRRNARSSRVRLRRRRSRLLSLKHIISKEFGLHYEDYIALDGNLPKAYTGKIESIYKLRYEALSQAISKEDLARVILHIAKHRGYMNKNQKTSQDSEKGAILSAIKENSNKIKHYQTAGEYFYKELFENLRDGTKEFKNIRNKAMKNEKTGNMESTYYNTILASDLEKELKLILEKQQAYHNYSDTFIKEVLEIAFYQRPLKDFSHLVGSCTFYENEKRACKNSYSAWEFIALGKIINTLESIKKDTGEIFSNEIITQILKEVLDKGSLSYTKLRKMINLDEKVKFKGLKYDKEGVEKTNLIEFKKLKEFKKALGEHNLERKTLDEIATHITLTKDENQLKKQLEQYALSQNQIDALAELDFNDHINLSFKALYEILPLMEKGKRYDEACNELGLKAKTSNQKSEFLPAFCDSIFAQELTNPIVNRAISEYRKVLNRLLKKYGKMHKIHIELARDAGLSKEARNKIEKEQKENKDINDKAEKTCKEFGLKPNAKNILKIKLWREQGEICAYSGKKITIDDLKEDKALEVDHIYPYSRSYDDSYNNKVLVFIKENQLKLNQTPYEAFGSNQEKWSKIQVLAQKLPYKKKNRILDENFKNKDQIEFISRNLNDTRYATSLIAKYTKEYLEFLPLSDDEDISLKSGEKGSKTHVQTMNGMLTSVLRHAWGFSQKDRNNHLHHALDAIIIAYSTNSIIKAFSDFKKNQEILKAKLYAKKLTSEEYKNQSKFTGFEKYRSKILEKLDSIFVSKPPNKNTKGALHEQTFYSYQDILEEYKTQEGLKRALECGKVRKIGTKYVVNDRMVRLDIFKKDNKFYGIPIYTMDFALGVLPNKVVTIGTDKDKIKKEWKTIDETYEFCFSLYKGDLVLIQKKEMQESEFAYYNGFDISSASISLEKHDNKFENLTENQKLLFPKAKEGDVEVRGIGIQGLKVFKKYMVTPLGEIQETRTEARQNIQPRKKHGLR

SEQ ID NO: 795 - protein, 1345 aa, Listeria monocytogenes
MQLKIVEGMKKMKKPYTIGLDIGTNSVGWAVLTDQYDLVKRKMKISGDSEKKQIKKNFWGVRLFEKGETAAKRRMSRTARRRIERRRNRISYLQEIFAIQMNEVDDNFFNRLKESFYAESDKKYNRHPFFGTVEEEVAYYKDFPTIYHLRKELIDSQKKADLRLVYLALAHIIKYRGHFLIEGALDTKNTSIDEMFKQFLQIYNQVFANDIEEASLKKTEKNQEVAQILAEKFTRKDKLDKILSLYPGEKTTGVFAQFVNIIVGSTGKFKKHFNLHEKKDINCAEDTYDTDLESLLAIIGDEFAEVFVAAKNAYNAVVLSNIITVTDSTTRAKLSASLIERFENHKEDLKKMKRFVRTYLPEKYDEIFDDTEKHGYAGYISGKTKQADFYKYMKATLEKIEGADYFIAKIEEENFLRKQRTFDNGVIPHQLHLEELEAILHQQAKYYPFLREDYEKIKSLVTFRIPYFVGPLAKGQSEFAWLTRKADGEIRPWNIEEKVDFGKSAVDFIEKMTNKDTYLPKENVLPKHSLCYQKYMVYNELTKVRYIDDQGKTNYFSGQEKQQIFNDLFKQKRKVKKKDLELFLRNINQIESPTIEGLEDSFNASYATYHDLLKVGMKQEILDNPLNTEMLEDIVKILTVFEDKRMIKEQLQQFSDVLDGTVLKKLERRHYTGWGRLSAKLLVGIRDKQSHLTILDYLMNDDGLNRNLMQLINDSNLSFKSIIEKEQVSTADKDLQSIVADLAGSPAIKKGILQSLKIVDELVSVMGYPPQTIVVEMARENQTTNKGKNNSKPRYKSLEKAIKEFGSQILKEHPTDNQELKNNRLYLYYLQNGKDMYTGQELDIHNLSNYDIDHIVPQSFITDNSVDNLVLTSSAGNREKGDNVPPLEIVQKRKIFWEKLYQGNLMSKRKFDYLTKAERGGLTEADKARFIHRQLVETRQITKNVANILHQRFNYKTDGNKDTMETVRIVTLKSALVSQFRKQFQFYKVREVNDYHHAHDAYLNGVVANTLLKVYPQLEPEFVYGEYHQFDWFKANKATAKKQFYTNIMLFFAQKDRIIDENGEILWDKRYLETVKKVLGYRQMNIVKKTEIQKGEFSNVTPNPKGKSNKLIPRKKDWDPIKYGGFDGSKMAYAIIIEYEKQKRKVRIEKKLIQINIMEREAFEKDEKTFLEEKGYHQPKVLIKVPKYTLYECENGRRRMLGSANEAHKGNQMLLPNHLMALLYHAEKYEAIDGESLAYIEVHRALFDELLAYISEFARKYTLSNDRLDEINMLYERNKDGDVKSIAESFVSLKKFNAFGVHQDFSFFGTKIERKRDRKLNELLNSTIIYQSITGLYESRKRLDN

SEQ ID NO: 796 - protein, 1389 aa, Oenococcus kitaharae
MARDYSVGLDIGTSSVGWAAIDNKYHLIRAKSKNLIGVRLFDSAVTAEKRRGYRTTRRRLSRRHWRLRLLNDIFAGPLTDFGDENFLARLKYSWVHPQDQSNQAHFAAGLLFDSKEQDKDFYRKYPTIYHLRLALMNDDQKHDLREVYLAIHHLVKYRGHFLIEGDVKADSAFDVHTFADAIQRYAESNNSDENLLGKIDEKKLSAALTDKHGSKSQRAETAETAFDILDLQSKKQIQAILKSVVGNQANLMAIFGLDSSAISKDEQKNYKFSFDDADIDEKIADSEALLSDTEFEFLCDLKAAFDGLTLKMLLGDDKTVSAAMVRRFNEHQKDWEYIKSHIRNAKNAGNGLYEKSKKFDGINAAYLALQSDNEDDRKKAKKIFQDEISSADIPDDVKADFLKKIDDDQFLPIQRTKNNGTIPHQLHRNELEQIIEKQGIYYPFLKDTYQENSHELNKITALINFRVPYYVGPLVEEEQKIADDGKNIPDPTNHWMVRKSNDTITPWNLSQVVDLDKSGRRFIERLTGTDTYLIGEPTLPKNSLLYQKFDVLQELNNIRVSGRRLDIRAKQDAFEHLFKVQKTVSATNLKDFLVQAGYISEDTQIEGLADVNGKNFNNALTTYNYLVSVLGREFVENPSNEELLEEITELQTVFEDKKVLRRQLDQLDGLSDHNREKLSRKHYTGWGRISKKLLTTKIVQNADKIDNQTFDVPRMNQSIIDTLYNTKMNLMEIINNAEDDFGVRAWIDKQNTTDGDEQDVYSLIDELAGPKEIKRGIVQSFRILDDITKAVGYAPKRVYLEFARKTQESHLTNSRKNQLSTLLKNAGLSELVTQVSQYDAAALQNDRLYLYFLQQGKDMYSGEKLNLDNLSNYDIDHIIPQAYTKDNSLDNRVLVSNITNRRKSDSSNYLPALIDKMRPFWSVLSKQGLLSKHKFANLTRTRDFDDMEKERFIARSLVETRQIIKNVASLIDSHFGGETKAVAIRSSLTADMRRYVDIPKNRDINDYHHAFDALLFSTVGQYTENSGLMKKGQLSDSAGNQYNRYIKEWIHAARLNAQSQRVNPFGFVVGSMRNAAPGKLNPETGEITPEENADWSIADLDYLHKVMNFRKITVTRRLKDQKGQLYDESRYPSVLHDAKSKASINFDKHKPVDLYGGFSSAKPAYAALIKFKNKFRLVNVLRQWTYSDKNSEDYILEQIRGKYPKAEMVLSHIPYGQLVKKDGALVTISSATELHNFEQLWLPLADYKLINTLLKTKEDNLVDILHNRLDLPEMTIESAFYKAFDSILSFAFNRYALHQNALVKLQAHRDDFNALNYEDKQQTLERILDALHASPASSDLKKINLSSGFGRLFSPSHFTLADTDEFIFQSVTGLFSTQKTVAQLYQETK

SEQ ID NO: 797 - protein, 1149 aa, Spiroplasma apis
MKKYILGLDLGISSVGWAVTGYDDENAIEPWLDDFGVRLFEVPENPKDKTSLAAERRGFRSSRRLKRRKKARIKLLKKILIDSDIINENLYEKTFNFSISSLKPTNKIVYDEKKYFNPYVIRKKGLKEKLSSEELTIALVHIAKNRGFENLFDPEKGEDKSELKDDAEINEKEDYANSIIIARKLIGYDIATKTCKKTIAEAFIDEESSTRIEKNKNLLNVRNKDSQYRFLFPRAAYKYELELILNKQAEYYPQLNNEIIDKIMDTILRQRFFEDGFGPKNISRAENIELIKQKLSNIKDKNNHYIALRDSLRAYKLYKPFTELVGNCTFFPNEKRYIKSSIIFDLYQMAVEVSKFSSFLENKQTIKDFHNKLFNLALTDEKFISNNKKQIESVLKTDFGVKSEDLKNLKALDNAKKTDLFGFTKRFIKVFGMEKLKELNIDNLDSNIIDDLGDILNKNITPELRKSNIKKWASDNNVTINDENINQLLLTPSKVTTTSNLCKKAMLMVIKHFLEGEIAGVYQDELKAKANEYTDLNIKKFLQPIVDGDLVRNPVVFRAINEARKVLKALFRKYNDFEKINVETSRELGKSGEVRNELNKKNLDSRAKNEVIKSELEKIGIVANTTSILKYKLWLAQDKKCLYSLRDIKIEQLNSHELEVDHILPISKFPDDSFDNKVLVYTTENQLKKNRTPLEYFNAENPDIINSYKKNCLDLYRKGNITWNKYENLLIKSVLDIDQNKFSSRNLVDNSYIARYFANWLKNNLIHKYKKENKEYKSNVLMIKGVVTSRFRRKWLRFSPWGLDIKVRDITPFHHAVDAIVLSQFKNQGSVDFASDLIAIENEFKSFKYKNISLEQYHNNVKEICSKWHDNSGYQWQFQISKPIERIDDFINSDCQAIKMFPLVKNLDKLIDLRMPIELSVKVDVDTVKLTEKELKRNFKNLNELSILNEKDFKKEIKVKRPVFVKVKHPQEYIETLKNANVAGDIHYPFVSYKVNHKVSGSVTSSEKMAAKKLLKDSNKDQFHIDRHGNLWETNVYYGVIIDKEGINKPRWIKKIDIFKNKNILKLRDNELILRQNDTVFYKNKDDNYEYKVFKSKMGAQICATKINTTYISTLHKNKEIFGTQNCYDSLSNILKEIKIITIDILGKA

SEQ ID NO: 798 - protein, 1137 aa, Bifidobacterium callitrichos
MSAKRYRVGIDVGLNSVGLAAIEVDDANTPIRILNAQSVIHDGGVDPTRNKDAATRKSVSGESRRARRMLRRRRKRLNQLDELLQRLGYPIIDPETLDTFDEWKIRSGLADVFIEDEATRKENISIAIRHIARHRGWRNPYHRVESLLVDNPYSEQYRELKTRAEAQIGHALDEDMTSAQIVIAAWPHRTVDNARLRTSSKRGEGLLPSKLMQEDNANELKRIFSVQRVPESEGDLLFHAIFRANSPKGSAEKRVGRDPFDAAQPRALKASLVFQRYRIANVLTNLRIQENKQERPLTIEEKQTIFAMLVSDDSKDITWGDVASHLGYERRQLRGVGKTTEDGEDRISSTPPRLTSFQRICEADKKIAKPLQAWWQNASGQAQESMIRLLSNTVDLDGVHGDISYEEALDFIDGLDDEGLSRLDSVDLPAGRAAYGEETLRKLTERMLTTNDDLHAARKVLFHVSDYWRPPADPIGASLGNPSVDRVLRIVSRWLSNCRNRWGTPVSVQIEHVRSAFDSVATARQYERRTGNRSVYRSSLAKQLRESEHLDRVRSEDIRRIEAIQRQNGECLYCGRPIAFRNCEMDHIVPRKGAGSTNTRTNLAAVCIECNRLKSNIPFAVWADSEAAHARGVNLKESLQRVDHMLYDRNADTSQTWRRFKQDVKIRLKQTYSDEPIDNRSIESVAWMADELHRRIDWYFNAGHYLEECDELRPRIMVEVRVFQGRVTALARRASGLEGRIHFFGARYKTRLDRRHHAMDASVIAIMRPSVAQTLVERDSLRESQLIAGRLANGERSWKEYPYEGCPGYVPFQQWRAAMESLLELLNDALDHDRIVVRQPMRLQLGNSIAHDATVKKLLRVRLGDAMDADLVRRASTPALWCALTRLPDFDAAVGLPANDSRTIAVHGVTYSASDEVEFFDGQSAQLAVRGGSADIGSSIHHARVYRCWKQNAKGVRKYWYGMIRVFQVDLLRARGADLFSEPLPPQSVSMRWGEPRTVQAVQAGNATYLGWMVVGDELRVEFPRETALNGQIGEFVDWCDGSDSASTAQCSWVLDGFFSNKQLRLHPRLLASEGLMKLGKNQEIPDGVQKVVAKTGWISTVDVFGGFSPTVIRRNTLGEARWRSQSGLPCSWRWFD

SEQ ID NO: 799 - protein, 1377 aa, Streptococcus sp.
MNNKPYSIGLDIGTNSVGWSVITDDYKVPSKKMKVLGNTDKRFIKKNLIGALLFDEGTTAEARRLKRTARRRYTRRKNRLRYLQEIFAEEMSKVDSSFFHRLDDSFLIPEDKRGSKYPIFATLVEEKEYHKQFPTIYHLRKQLADSKEKADLRLIYLVLAHMIKYRGHFLYEEAFDIKNNDIQKIFNEFISIYDNTFEGSSLSGQNAQVETIFTDKISKSAKRERVLKLFPDEKSTGLFSEFLKLIVGNQADFKKHFDLEEKAPLQFSKDTYDEDLENLLEQIGDDFADLFVAAKKLYDAILLSGILTVTDPSTKAPLSASMIERYENHQKDLAVLKQFIKTNLPEKYVEVFSDQSKDGYAGYIDGKTTQEAFYKYIKNLLSKFDGADYFLDKIEREVFLRKQRTFDNGSIPHQIHLQEMNTILRRQGEHYPFLKENKEKIEKILTFRIPYHVGPLARGNRDFAWLTRNSDQAIRPWNFEEIVDKASSAEDFINKMTNYDLYLPEEKVLPKHSLLYETFAVYNELTKVKFIAEGMRDYQFLDSGQKKKIINQLFKKKRKVTEDDIIDCLQKIDNYDGIELKGIEKQFNASLSTYHDILKIIRDKEFMDDPKNGDILENVIHTLTIFEDREMIKQRLAQYNSIFDEKVIKALSRKHYTGWGKLSAKLIDGIRDKQTGKTILDYLMDDGKSNRNFMQLIKDDELSFTEIIQKAQVVGDTDNLRQVVQNLPGSPAIKKGILQSIKIVDELVKVMGHAPESIVIEMARENQTTARGKKNSQQRYKRIEDSLKNLASGLDSNILKENPTDNIQLQNDRLFLYYLQNGKDMYTGEALNINQLSSYDIDHIIPQAFIKDDSLDNRVLTSSKDNRGKSDNVPSLEVVEKMKAFWQQLLDSKLISERKYNNLTKAERERGGLNELDKVGFIKRQLVETRQITKHVAQILDARFNKEVTEKNKKNRNVKIITLKSNMVSNFRKEFGLYKVREINDYHHAHDAYLNAVVAKAILKKYPKLEPEFVYGDYQKYDLKRYISRSKDPKEVEKATEKYFFYSNLLNFFKEEVHYADGTIVKRENIEYSKDTGEIAWNKEKDFATIKKVLSLPQVNIVKKTEEQTVGQNGGLFDNNIVSKKKVVDASKLIPIKSGLSPEKYGGYARPTIAYSVLVTYKQNNKIKNTMVGIPVLTKLEFERDPNLYLRNLGINNVSHVIKLVKYTVLEFKHKYGTYRRFIVSNQELKRANQIFVTTKQMKLISQYTTLDKNEHDSLLKNNQQLIQSIWNQFLEFMLATDLVNKKQYDELILTNNQTIEECRNIMNRVITTLSFTNINAGQKKIIFDDTLSLPIKRWQFTDSDKMVKKIIESTLIHQSITGLYETRIDLSKLGED

SEQ ID NO: 800 - protein, 1117 aa, Burkholderiales bacterium
MQTKNLLYTLGLDIGIASVGWCVLGENRIIDLGVRCFDKAETPDRGESLNKVRRDARLMRRRLRRRAWRLTKLARLLKHAGLIDSTRIVRDRHDGAVSPWQLRVEGLDRKLAPEEWARVIYHIVKHRGFHWISRAEERKAESDKGEGGKVKQGLSATKQLMVEKNYRSAAEMVLTEFPGAQRNKRGEYTKALSRILLAAELTTLFERQQELGNPHAGPDLQTKILGNGDRKSGLLWMQKPPLSGSALLKMLGKCTFEREEYRAPKASFTAERHVWLTKLNNLRVLVDGVTRPLSDPERRLALSLPYQQASDFTYKQLRAALCKNGLLPDSFQFSGLAYPTGAQQPDGKAKNPENDRLVKLPAWQEFRKTLRDAGLETEWESIAGMAAGGQPDLLDQIGWVLSVFKDGDEVLRELRKIPLPGGEKMVQALSGVSFDTFHNLSLKALRKIVPHMEAGLRYDEACLAAGYHHSDLRKDTDERSLYLPPLYSGRTTDGRMVFRDDIDVPRNPVVLRAINQARTVVNSVVRRYGSPSSMHIEMARDLSRPWDERNKVKRAQEEYRDRNEKLKIDFAAEYGIEPKSREFEKFLLYREQGGKCAYSLKPLDLDRVLRDLGYAEVDHALPYSRSFDDSKNNKVLVLAEENRNKGNRTPYEYLDGTSESPRWREFKAFVETNKAYRLAKRARLLRKDFSGKGSEEFRDRNLNDTRYISRFFKNYVERFLKLAEESEERTCVVLSGQLTAFLRARWGLAKVRGDSDRHHALDAAVIAACSRSMVKRLSDYARRHELEKVRTGFVDFETGEIVDAGKYRQIERDFPSPWPYFRDELLTRLNTDDPAELRERMQSLGSYPPEALETLRPMFVSRAPQRRNGGAAHKDTIYRQTERLKKVGSVTQKVPLAALNLRDLENLVDPHRNEKLYAAIRARLEAHGGKGEKAFPPNNPLRKPDRDGNPTGPIVRTVTLVIDKMSGIPVRGGVAKNDTMLRVDIFRSKKDGKFHLVPLYVHHAVAKQLPTRAVIAYKDEGEWTPINNHDFDFLFALYPNDLVRITLKKERHFGYYAGCNRATGAVSIWAHDRNQRIGKDGFIDGIGVKTALSVEKFHVDTLGNVYPAPPETRRGLA

SEQ ID NO: 801 - protein, 1377 aa, Streptococcus equinus
MEKTYSIGLDIGTNSVGWAVITDDYKVPAKKMKVLGNTDKKYIKKNLLGALLFDSGETAEATRLKRAARRRYTRRKNRLRYLQEIFAKEMAKVDESFFQRLEESFLTDDDKTFDSHPIFGNKAEEDTYHQEFPTIYHLRKHLADSPEKVDLRLVYLALAHMIKFRGHFLIEGQLNAENTDVQKIFADFVGVYDRTFDDSHLSEITVDAASILTEKISKSRRLENLIKQYPTEKKNTLFGNLVALALGLQPNFKTNFKLSEDAKLQFSKDTYDEDLEELLGKIGDDYADLFTAAKNLYDAILLSGILTVDDNSTKAPLSASMIKRYEEHHEDLEKLKTFIKVNNFDKYHEIFKDKSKNGYAGYIENGVKQDIFYKHLKSIISEKNGGQYFLDKIEREDFLRKQRTFDNGSIPYQIHLQEMRTILRRQGEYYPFLKENQAKIEKILTFRIPYYVGPLARKNSRFAWAKYHSDEPITPWNFDEVVDKEKSAEKFITRMTLNDLYLPEEKVLPKHSYVYETFAVYNELTKIKYVNEQGKSFFFDANMKQEIFDHVFKENRKVTKAKLLSYLNNEFEEFRINDLIGLDKDSKSFNASLGTYHDLKKILDKSFLDDKTNEQIIEDIVLTLTLFEDRDMIHERLQKYSDIFTSQQLKKLERRHYTGWGRLSYKLINGIRNKENNKTILDFLIDDGDANRNFMQLINDDSLSFKTTIQEAQVVGDVDDIEAVVHDLPGSPAIKKGILQSVKIVDELVKVMGHNPQNIVIEMARENQITGYGRNRSNQRLKRLQDSLKEFGSDILSKKKPSYVDSKVENSHLQNDRLFLYYIQNGKDMYTGEELDIDHLSDYDIDHIIPQAFIKDNSIDNRVLTSSAKNRGKSDDVPSIEIVRNRKSYWYKLYKSGLISKRKFDNLTKAERGGLTETDKAGFIKRQLVETRQITKHVAQILDARFNTKCDENDKVIRDVKVITLKSSLVSQFRKEFKFYKVREINDYHHAHDAYLNAVVGTALLKKYPKLAPEFVYGEYKKYDVRKLVAKSSDNHSELGKATAKYFFYSNLMNFFKTEVKYADGRVFERPDIETNADGEVVWNKQRDFNIVRKVLSYPQVNIVKKVEVQTGGFSKESILPKGDSDKLIPRKTKKLQWETQKYGGFDSPTVAYSVLVVADVEKGKTRKLKTVKELVGISIMERSSFEENPVSFLEKKGYHNVQEDKLIKLPKYSLFEFEGGRRRLLASATELQKGNEVVLPQYMVNLLYHSQHVNNSHKPEHLNYVKQHKDEFKDIFNLIISIARINILKPKVVDNLINEFTEYGQEDISSLSESFINLLKFISFGAPGAFKFLKLDVKQSNLRYKSTTEALSATLIHQSVTGLYETRIDLSKLGEE

SEQ ID NO: 802 - protein, 1065 aa, Actinobacillus succinogenes
MNNMNLNYILGLDLGIASVGWAVVEIDEQENPQRLIDVGVRTFDRAEVLKTGESLALARRLARSSRRLVKRRAERIKKAKRLLKAENLLLSADEILPNEAWQLRVKGLDQKLERQEWAAVLLHLLKHRGYLSQRKNESKSENKELGALLSGVAINHQILQSAEYRTPAEIAVNKFQAEEGHIRNQRGAYTHTFSRLDLLAEMELLFQRQATLGNPHTSTKLLENLTALLMWQKPALAGEAILKMLGKCTFEPTEYKAAKNSYSAERFVWLTKLNNLRILEQGAERALTDNERFALLDQPYEKAKLTYAQVRTLLGLSDEAIFKGLRYQGEDKKAVETKTTLMEVKAYHQIRKALEGLDLKAEWNELKNNPALLDEIGTAFSLYKTDDDIHRYLDGKLSESVLNALLENLNFDKFIQLSLKALQQILPLMLQGQRYDEAVSAIYGDHYGKKSDEIDRLLPNIPTDEIRNPVVLRTLTQARKVINAVVRLYGSPARIHIETGREVGKSYQDRKKLEKQQEENRKQRENAVKKFKEYFPNFVGEPKGKDILKMRLYELQQAKCLYSGKSLELYRLLEKGYVEVDHALPFSRTWDDSFNNKVLVLANENQNKGNATPYEWLDGKNNSEGWQHFVARVQTSGFSYAKKQRVLIQELDEKSFIERNLNDTRYVARFLCNHIADNMLLTGKGKRKVFASNGQITALLRGCWGLQKVRENNDRHHALDAVVVACSTKSMQDKITKFVKYKEGRLFKDKKDGVYKGERINRETGEIISLHFPTPWKFFKENVEIRIFSENPKLELENRLPDYPQYNHEFVQPLFVSRMPTRKMTGQGHMETVKSAKRLDKGLSVLKVPLTQLKLSDLERMVNREREMALYEALKECLEQFGNDPAKAFAEPFYKKGGALVKAVRVEQTQKSGVLVRNGNGVADNATGSIVRVDVFTKGGKYFLVPIYTWQVAKGILPNKAVIQGKDESEWEEMDENAVFQFSMHKNDLIKVKTKKGEIFGYFNGLDRATGSIEIEEHDLEKSKGKNGSHRGLGVKTAFFLEKYQVDELGKNIRPCRPTKRQHVR

SEQ ID NO: 803 - protein, 1368 aa, Lactobacillus reuteri
MIKKDYNIGLDIGATSVGFAGIDEQYDPIKLKGKTVVGVNLFEEGQTAADRRSFRTTRRRLNRRKWRLSLLEEFFDPYITPVDPAFFARLKESNLSPKDNNKNFSRSLLFPDITDQKFYEEYPTIYHLRYALMTENKKFDLRAIFLAIHHMIKYRGNFLNSTPVAHFDTSKIDFANDFSKLNRLYLNEDPNNIFEINLQNVKEISDILLDHSIKKFDKQKQVAKLLLTSQNDKELDKRNKQIATQISKAILGYNFSLNEILKLEAVNKSKWKLNFSSADIDDTLPDLISELDESQESILNIILSLYSRLTLNGIVPSGMSLSESMIDKYGTHKEHLDLLKKYLKTLPIKNRKEIAEAYAEYVGNSLKKSGHISQEEFYKAVKKNLDKSETAQKILSLISEEKFMPKQRTNQNGVIPYQLHQKELDQIIVNQSQYYPWLAELNPVTEHKDAKYKLDELIAFRVPYYVGPLIDPKTIPQTEQGNKNASFAWMVRKENGQITPWNFDKKVDRISSANNFIKRMTTKDTYLIGEDVLPAHSLIYERFKVLNELNMIRVNGKKLSVSVKQNLYNDLFKQQKTINRKKLANYLQANLGIPERPQITGLSDPEKFNSQLSSYIDLQKILGSEIVDDPNKQDDLEKIIEWSTVFEDSRIYKVKLQEIGWFTEKQKNELVSHRYQGWGRLSKKLLVELKDKNGRSIIDLLWNSQRTFMEIQSRPEFAEQITNENQDKLTEDNYEDVLADAYTSPQNKKAIRQVIKVVDDIVKATGKAPKFISLEFARSDERSDRVKSRKTHIQKIYETTAKELLKDDQLIKELGSVSDLSDRLYLYFTQLGRDMYTGKPINIDEISTMYDIDHILPQAFLKDDSLDNRVLVRRQDNNAKSDTVPALKFGKMKPFWNKLQKHGLISKRKLNNLQTNPESIDKFKAVGFVNRQLVETRQVIKLAANILASRYPDSKIIEVKASLTHQMRESFNLIKNRDVNDYHHAVDAYLSAFVGQYLYNRYPKLQPYFVYGQFKKFDKQSTRIGMKTNHFNFLYDLEPEGKNVKIKKPTKIINKETGEIIGDRDELVAKLNRVYNFKYMLVSQEVYTRSGALFDQTIYPANSGKKLIPLKQNKTTAIYGGYSGSKAAYMSIIRLRDKKGGTYRIVGIPVRAVNKLNQAKKKSNEKYLAELKAVIEPQIAKTKKDRKTGQRVLVPQEFDVIIPEVMYRQLIVDGDQKFTLGGTIDRYNAVQLVLNQEILTFLEQPTKYKDADTKLLDIYDQIVNLVEKYFMLFDSKRLAAGRVAFEKLPTLQPVDKMPSKLIIIRRIIQGLHDNAARTDLKAINGSSSFGRLQKRNGIILSPNACLIYQSPTGLFERKVYLNTISPLK

SEQ ID NO: 804 - protein, 1248 aa, Sediminibacterium sp.
MNKKILGLDLGVTSIGWAVIQENDSRKEILGMGSRIVPLDNDEKTEFSTGNKISKNQKRTAKRTQRKGYDRYQLRRSYLTKVLIENKMFDESLFKLPSIELWGLRAKGVTEKLSLKEIGRVLYHLNQKRGYKSSRSDANLDKKDTEYVLAVKGRHQEIKELGLTIGQKFYKELQQNEFYRIKEQVFPREAYLEEFDAIVKIQSGFYPEIFTEQLISKIRNEIIYYQRPLKSQKGLVSICELAGFTTKDGKGNSIFVGPKVAPKSSPIFQLCKIWEIVNNISLKIKSQESKGNKWIDFVPTIEQKERIVNYLNNNTKLSYTELIKILGLNKENVYANKQIQNGLPGNITVAEIKKVLENDIPDFDIEILLLDSIQVLVDKKSGEILSEVSGEVISENFENNTLYRIWHTIYSIKDEVECQLALVQKFGISEQKAKALAKIDFTKHGFGNKSSKAIRKILPYLMRGYVYSDACELAGFNHSNSLTKEEKAKMEYAEKLELIPKNSLRQPVVEKILNQAINVVNAIISKYGKPDEIRVELARELKQSKDERNEMDFRNRSNEKLNAEIGQRLSSLGIPATKRYIQKYKFIFPSLSKNLKDAHVENICIYCGKSFNISEALTGDNFDVDHIVPKSLLFDDSQTNKVLVHRSCNAQKTNQTAFDFIAKKGDVELTDYISRVDDWFKRGIISYSKMQRLKISYEGYLERKRQKKETESDKKIWENFIDRQLRETQYISRKARSIFEKICPLVTTSEGTVTAELRRLWGWNDVLMNLQKPKYQALGLTQKIEWSSNHGQKQHSKEEIIGWTKRDDHRHHAVDALVVACTKQGYIQRINTLNSSDVKDAMRREILDASIVFDEKRNLLEQYFIKERPFTTSEVENEAAKILVSFKSGKKVASKGIRKAKINGEKQIVQRNIIVPRGALSEESVYGKIKIIEKGKPVKYLFEHPDLIVNTDIKNLIRERLNQNEGNVRLALASIKKNELLTQSGVKILEGDCYKEEYVIKYPIQNIKSKDVEFIVDGAVKNAIQKRLDKYGGKEKEAFKETVWLNEEKQIPIKTVRMFTGLSVVEPFSKDNRGHAIGFVKPGNNHHIAIYIDENGNKLEHICTFWHAVERKKYGLPVIIKDTNEVWSKILEGNDYPDSFLEKLPKDKLIYHESMQQNEYFLLGIDESVLSDLENIDYSFLSDYLYRVQKIGASYYVFRHHLETSLVDTNEAKLSKRYISIRSFAAYDSYKPIKVWVDVIGKIRKINA

SEQ ID NO: 805 - protein, 1526 aa, Bacteroides timonensis
MKKILGLDLGTNSIGWALIDGEENRILGMGSRIIPMTQDVLDTFSGGNPLETQTAVRTAYRGVRRLRERTLLRRERLLRVLNVMAFLPEHYAFQIDFEKRLGQFLDEKEPKLAWRQNDDGKFEFIFQQSFNEMIEEFKNNGVVAGDKKIPYDWTIYYLRKKALSQKIEKEELAWILLNFNQKRGYYQLRGEEEEENSNKSVEYYSLKIADVVADDRSNSKGETWYSLHLENGWVYRRSSRIPLFDWKDKTRDFIVTTDLNDDGTVKKDKEGIEKRSFRAPSENDWTLLKKKTEKDIEKSRKTVGAYIYETLLQNPMQKVRGKLVRTVERKFYKDELRQILEKQKEFHSELGNEDLYNDCIRELYRNNETYQLILSKRDFVHLLLNDILFYQRPLRSQKSSISDCALEFQTYKDKDGNEIKEHLKAASKSNPLYQEFRIWQWLYNLRIYRKEDGEDVTAQFITGVEDKEQLFDFLNDRRDVEQKPLLDYLIKAKGLKKQVKTDTYRWNYVEDKAYPCNETGVMISTRLAKVENISDDFLTKEMEQKLWHIIYSVTDKNEFEKALKTFAKKNGLDVVSFVDSFKKFPPFKCEYGAFSEKAIKKLLPLMRLGKYWKWNDIDDNTQNRISKIITGEYDEGIKDIVREKVVNLTNENDFQGLQLWLTQYVVYGRHSEADIAGKWRSVADLEKYLDDFKQHSLRNPIVEQVITETLRVVRDIWKQYGRGAEDFFSEIHVELGRDMKNTADERKRLTNVIVENENTNLRIKALLMELKNNADGKLEIENVRPYSPMQQDILKIYEEGVINSGIEIDEDIRKISKTAQPTAAELQRYRLWLEQKYRSPYTGKVIPLGKLFTEEYQIEHIIPKSRYYDDSLSNKVICEAAVNKLKDKYLGFEFIKNYHGQIVEIGFGQKATIFDEGEYQDFVKRHYAHNHSKRAKLLLEEIPEKMIERQMNDTRYISKFVFPLLSNLVRAEKGDDGVNSKNVLPGNGKITTILKQDWGLNDVWNDLILPRFVRMNKLTGTTAFTSWNEQYQKYLPTVPLDLSKGFQKKRIDHRHHAMDALVIACATRDHINLLNNKHANTDTIRYDLQRKLRLFERVTYTDPHTKEQVTKDIPKEFKKPWDSFTVDARNELGKIVVSFKQNLRIINKATNIYEKYEDGEKVNVKQKGINWAIRKPLHKETVFAKVSLRKIKKVRLSDALKDWKKIVDKGLKQEIERLVCQYHRFNPDEICRYFKARGNQFGGVDISKVDVYYFDEENAAVRKNVDTSFTEKFIRESVTDTGIQKILINHLKAKGDKTEIAFSPEGIEEMNKNIVQLNGGKFHQPILKVRIYQALGNKFQIGTMGNKKDKYVVAEAGTNLFFVVYEKDGKRNYETIPLNEVIEHQKWRGTLSKEEQQKIPVIPIKNDRGMFVFYLSPNDLVYVPTAEQLGDINISVNDIKPNRIYRFTDSSDTRANFIPMSIAEVLFNCNKDKQKKIGIEYSIQNEIGIGSQGSKNQKSINGDMIKDICLKLKIDRLGSIKEISGL

SEQ ID NO: 806 - protein, 1077 aa, Oceanobacillus manasiensis
MKYSIGLDIGISSVGWAVINLDKERIEDLNSRMFDVAENPKNGSSLATPRREARSARKRLRRRRYRVGRIRNLIIKKGLLSEVEADHLYEWQDGDFDIWLIRVNGLERKLTEREFARILIHYAKNRGFKSNRKSETNESEGGVLLKAVRENALLMEEKGYRSVAEMLVLDEKFNGKKRNKGGDYSHVLARDEIEKEIKDVFENQRKYGNEFATINIEKEYIDIWSSQRPFSSQDDIAKKIGNCTLEEDQKRAPKFSYTFEKFRGLDKINRLRIISTEGPQRSLTGKERQEVMNSMLTKKEIKYKDLRKVLQLKDCERFNELYYDPGDTNEKNENKIFISLAGYYALKKIVKEVEGKTLAESYRPIDYDTFAYAVTVYKDDHDARDYLSNEYVNKNGKRVSNLANRHYSSELIEALLNLSYSKFGHLSLKALNKIIPFLEEGLLYNQACEKAGYNFNQKVGDKKEKFLPVIPADDIANPVVIRALSQTRKVINAIIKRYGSPSSIYIELARDMGRHYKERKEIEKQYNNNWKLNEKAKNQIHELHPEISNPRGHDILKYKLWEEQDGRCAYSLRPISQEKLFDYGTAEVDHIIPYSRSFDDSNANKVLVLARENQNKQNRTPYEWFGNDEVRWDKYISYVNSLKVRKKKKDLLLKQNFDDEQAEQFKSRHLNDTRYITRFLKAFIDDNLQFRGEEGNKQYVYTVNGAYTSLMRKRWGFNKNRSENDLHHALDAVLVAVSLPFRHRVSNYFKHSELHSSQILKRKGERFPEPWEGFSKELEARMLQNPEKLKLALESLSLASYDGDFLNRVKPIFVSRMPKRSVKGQIHEETIRRHRGFTEKGLNLMVKKYALKDINFDKNGDFPMYGKESDPKTYAAIKERYLEYGKDAGKAFSTVLYKPSKNPENAPIIRSVKLETTANQVFHLNDKTVAENASIARTEVFRHKENGRYYLAPVYVSDVLKNRVPEKFITALKPYSEWEEITSDYEFLFSLFSNDIIKLKMPREKKSKLNTGDLVTWDEGMFYFKGVHTGTAQINIIDHMSSFKDAIGSKSLQSFVKYQTDPLGNLTQVQKEKRYGV

SEQ ID NO: 807 - protein, 1122 aa, Comamonas granuli
MTQYVFGLDIGIASVGWAVLGDTRIVDVGVRCFDKAETAKEGDPLNLARRQARLLRRRLYRRAWRLTQLARLLKREGLIDNAKLFAQSPSFTDSAWELRRQGLDRLLTPLEWARVIYHLCKHRGFHWMSKAEEAKADSDAEGGRVKKGLKDTAARMAEKGYRSAAEMVLAEFPSAQRNKHGQYDKALSRMLLGEELALLFATQRRLGNPHASEHFETQILGNGDRRSGLFWQQKPALAGADLLKMLGKCTFEKNEFRAPKASFSAERHTWLTRLNNLRVIENGRSRPLNDAERTAALLLPYQTESFKYATLKKAFIKKGLWSDEMRFGGLAYPSRAQAESDKAKDPEDQFLVKLPTWHELRKAFNKVGQEALWQRISTPALDGRPELLDQIAWVLSVYKDGAEIEQQLRLLALPEPDICIPILEKISFDKFSSLSFKALRRIVPLMQTGLRYDEAVAQIPEYGHHSQRIDPDAPKRLHLPPFYQDQRKYSGKNDHVGSMQFREDANVPRNPVVLRALNQARKVVNALIRRYGSPIAVHIEMARDLSRPLDERNKVKKAQEEFRDRNDKARTDFERDFGYKPKAAAFEKWMLYREQFGQCAYSQEPLDIQRVLDDPNYAQVDHALPYSRSYDDGKNNKVLVLTRQNQNKGNRTPYEYLTALDGGQEGERWRAFSAWVQGNKSYRMAKRNRLLRKSYGAEESKGFIDRNLNDTRYICKFFKNYVEEHLQLAERADGETTRRCVVVNGQLTAFLRARWGLAKVRGDSDRHHALDATVVAACTHGMVKRLADYSRRKELELLQEGFPDPETGDIINPAAFDRVRQHFPEPWAHFRHEVQARLFTDDLTKLREDMQRLGTYTAEDLTALRTLFVSRAPQRRNGGAVHKDTIYAQPESLKVQGGVIEKVQLTSLTLKDLDNLVEPHRNERLYAAIRTRLEDHGGKADKAFGPDNPLHKPDKNGQPTGPVVRSVKLVRNKQSGIPIRGGLAKNDSMLRVDVFTKAGKFHLVPVYVHHRVTGLPNRAIVAFKNEDEWTQIDDSFAFLFSIYPNDFLRVTLKKERFDGYYSSTDRSTGAVTLWAHDRAASVGKDGLIRGIGVKTALSIEKFNVDVLGHIYPAPLEVRRGLA

SEQ ID NO: 808 - protein, 1104 aa, unidentified
  source 1..1104: note = bacterium LF-3
MSRYVLGLDIGITSVGYGVIDIDNNLFVDYGVRLFKEGTAAENETRRTKRGSRRLKRRKSNRLNDMKNLLKENDLYFEDYRNYNPYEIRAKGLKEKLLPEELCTAIMHITKSRGTTLEALADESQDDEGTKATLSKNAKELNDGKYICEVQLDRLNKDHKVRGTENNFKTEDYVKELKEILKHQDLNEELCDQIIEMVSRRRRYDQGPGSEKSPTPYGSYRMVDGVLKHVNLIDEMRGRCSVYPDEFRAPKQSYTAELFNLLNDLNNLTIKGEKITVEEKEKVVAFVNEKGSITVKQLLKLLDAQEDEVTGFRIDKNDKPLITEFKGYSKVLKVFKKYNQQELLEDKLIVDQVIDICTKSKGIDERKKDIKELYPEFDNELIEELASVKGVSAYHSLSFKAMHIINKEMLTTEMNQIQVLHEIEMFDKNRKSLKGKKNIEPDEEAILSPVAKRAHRETFKVINALRKQYGEFDSIVIEMTRDKNSKEQVKRINDSQKRFKSENDRVDGIIKNSGIDPERVNGKTKTKIRLYLQQDCKTAYTQQDIDLHTLIFDDKAYEIDHIIPISVSLDDSLTNKVLASRLENQQKGNLTPMMAYLKGKFTGGNLEKYKLFVSSNKNFNGKKRNNLLTEQDITKEDVARKFINRNLVDTSYACRTVLNTLQRYFKDNEIDTKVHTIRGQSTNIFRKRINLQKDREQDYFHHAIDALIVASLKKMNIVNSYLMHYNYSDLYDEETGEVFDVLPDKQFIDQRYISFISDLKNIYQESNQYNLGYITQEQMHYPLIKVSHKIDTKPNRKIADETIYSTRNIEGQDMLVEKIKNIYDPKEKKAIELVNNIINDDTDKYIMKHKDPQTFEKIKEVVLNHFNDYKDSKEYYVIDKKGKYSLKEESPLTSYYNENGAITKYSKKNNGPAITSMKFYSEKLGNHLAITSNYNTNNKKVILKQISPYRTDFYVSPEGKYKFVTVRYKDVFYKETIHKFVIDENWYHEEKIKKGILEDWKFVCSMHRDELIGLIKPEGKKFVYDASINGGQTQYHDGKHYEILKFTATNDEKKRTFEVKPINTNCSKRLMPSVGPFIKIQKFATDVLGNIYEVKDNRLKLEFD

SEQ ID NO: 809 - protein, 1403 aa, Weeksella massiliensis
MKTILGLDLGTNSIGWAYVKEAENNLEMSSIEKIGVRVNPLTTDEQTNFEKGKPITTNAGRTLARSARRNLQRFKLRRENLIQILKTHQWISDETILAEDGNKTTFETFRLRADAAERTLELHELARVLLQINKKRGYKSSRKVNNTEEGSLIDGMDIAKKLYHDNLTPGQYVLNLLESGTKKTPDFYRSDLQSEFDKIWHFQQQFYPELMTETLKEELIGKGKVATWAVLKTPFNLVGIKRNGKRDDIKLENYQWRNLALSVQMDLEQIAIVLQEINGQLANSSGYLGAISDRSKELYFNQQTVGQYQYAQLKKNPHARLKNQVFYRQDYMDEFEKIWEVQSKGREAIFSNALKEELRDVIIFYQRKLKSQKGLISFCEFEQREIEVNGKKKTVGLRVIPKSSPLFQEFKIWQILHNVKLKNKETKEIYILSQEEKQMLFDELNVKGNLSASEVLKLLVDKPKNWEINYKTFEGNRTNQSLYNAYLTILENEGYDVREELKLKMNKDDITLADIDKSATEITEMVRIIFKDLGIKTELLDFNAELEGKAFEQQLSYQLWHLLYAYEEDNSPTGMETLYHLLEQKFGFKKEQAKVIGSIALQDDYGSLSSKALRKIYPFIKENEYSVACDLAGYRHSKHSLTKEELDNRELKSRLDILPKNSLRNPVVEKILNQMVNVVNTIIDTENDQLEKEGKPRNFKFDEIRIELARELKKNAKERAKMTSEINRATIENEKIKTIISRDFSHIQNPTRNDVIRYKLYQELSSNAYKDLYTDTKIDYHKLYSKEYDIDHIIPQSRLFDDSLSNKVLVPRQSNLDKSNNTAYDYISSKGENSLIKFQAVIDSLLKENKISKAKYKKLLMKGSEIGEGFIERDLRDSQYIAKKAKEILFQITKSVLSTSGSVTDRLREDWGLINVMKELNLEKYRLAGLTEMRTTKEGNPKEIIIDWTKRNDHRHHAMDALTVAFTKHSHIQYLNNLNARRNEQSDKKKNIEGIELKETHVVKDGKGNSKRIFNEPIPNFRQIAKQHLEGVLVSHKAKNKVVTKNINRIKGSDKVQIALTPRGQMHKETVYGKIKQYTFKEEKIGAKFDEATIAKVSNPQFRTLLLKRLAENNNDPKKAFTGKNALSKNPILLKNGNELPEKVRLMWLEDDYTIRKDIGPDLKIDKVIDEGIKRILQARLQEFGGDAKKAFSDLEQNPIWLNKEKGISIKRVTISGVKNAEALHTKKNHLGNPILDESGQEIPVDFVSTGNNHHVAIYEDEKGNLQEKVVSFYEAVARVNEGLPIIDQTYNAHLGWTFKFTMKQNEMFIFPSDDFNPQEIDLLDRKNQTLISKHLFRVQKISSKDYMFNHHLETKAIDGEILKTKKSLIGVTHYYIQTPSKLKNIIKVRTNHLGEIIHIGEY

SEQ ID NO: 810 - protein, 1259 aa, Mycoplasma ovipneumoniae
MHNKKNITIGFDLGIASVGWAIIDSQTSKIIDWGTRTFEERNTADKRRAFRSIRRNIRRKVYRNQKFINLILKYKDLFELENISDIQRVNKKDTENYEKIISFFTEIYRKCAAKHSNILEVKVKALDSKIEKLDLIWILHDYLENRGFFYDLEEENVADKYEGIEHPSILLYDFFKKNGFFKSNSSIPKDLGGYSFSNLQWVNEIKKLFEVQEINPEFSEKFLNLFSSVRDYAKGPGSEHSASEYGIFQKDEDGKVAKKYDNIWDKTIGKCSFFVEENRSPVNYPSYEIFNLLNQLINLSTELKTTNKKIWQLSSNDRNELLDELLKVKENAKIISISLKKNEIKKIILKDFEFEKSDIDDQDTIQGRKIIKEEPTTKLEVTKHLLATIYSHSSNSNWVNINNILEFLPYLDAICIILDREKSRGQDEVLKKLTEKNIFEELKIDSEKQLDFVKSIFSNTKFNFKKIGNFSLDAINLFLPKMFEQNKNSEYLKWKDEEIRKEWEIQKSKLGKTDKKTKYLNPRIFQDEIISPGTKNTFEQAVLVLNQIIKKYSKENIIDAIVIESPREKNDKKTIEEIKERYKNSKGKNLEKLFKILNLENSRYKLSDLETKPGKLLDKLRLYHQQDGINLYTLEKIVIDDLINNSQKYEIDHIIPYSMSYDNSQANKILTTKAENLKKGKLIASEYIKTKGDEFYNKYYEKAKELFNKKNNTNKTNKKAKKIDYYVDLDEDSAKNRFRFLTLEDYDEFQVEFLARNLNDTRYSTKLFYHALIEHFENNEFFTYIDENSSSHKVKISTIKGHVTTYFRKKANNINKQQIEKNRENNEHHAVDAAIVAIIGNENRQIANLLTLADNKNDKKFILHDENHKENIETGELVKISKFEVDKLAKVEDLEKIIQEKYEEAKNHIPIKFSRKIRNITNGGLSDETLYGFKYDEKEDKYFKFIKKNLVTTENKDLRKYFKNPFGKKADGESEYTVLMAQSHLSEFNKLKEIFEKYNGFSKDSGKAFVEYMNDLALKEPTLKAEIESAKAVDKLLYYNYKSSDEFTYYDNINNKSFKRFYKNIKIIEYKSIPIKFKIVSKHDGGKSFKDKLFSLYSLVYKVYEKGKAIYKSIPVTSQMRKFGISEFDFLDENLYNKEKLDIYKSDFEKPIPVNCKPIFVLKKGSILKKKSLDIDDFKKTKDTENGIYYFISSMTKSSNVDTIYGLRPLNFKIERAVPHTTNPIFKQYIPIHLDELGNEYPIKIKEHNDDEKLMCTIK

SEQ ID NO: 811 - protein, 1356 aa, Lactobacillus heilongjiangensis
MSKKDSEYYIGLDIGTNSVGWAVTNGKYDLLNIKKKNLWGVRLFEAAESAAGRRINRSTRRRYRRRRNRINWLNEIFADELSKVDPSFLTRLNSSWISKKDSSRTRDKYNLFMDADYTDKNYHHKYPTIYHLRRDLMFDDKQFDIRLVYLALHNIIKYRGNFTYDHRKFNVSEMSSNLTKALENFNQELMEFEDAFPDNTDYSAISEVLLKSNNVSTKIDEIISNLELDKDTKKYLKEVLKLILGNSANLNTIFHTSLDKDDEKLSLSAKDIELKLNNLDSLLSDEQIHFISSANELYSSITLNDILDGKTYLSLAKIKQYDTHCSDLQELKEMWYKTTNPDLIKKSRKAYKEYVHGSYNTEDFYKAISPFLKIAIPEDLAKDALKKIDANTYLPKQRTSNNGVIPFQLNLIELEKIIDNQSKYYPFLKENREKIISILSFRIPYYVGPIQAPTDKNFSWMVKKIQAKARPWNFDEVIDREKSSNNFIKRMTTTDTYLVGEPVLPKNSLIYQKFEVLNELNNIRISKNLSQDPLGSKLSVEVKQQIFEELFKRYKTVKSDQLKKWLIRNSYFTDPTIIGLSKPSEFNSSLSTFIDMKAIFGMDFVNNPRNSSQLEELAEWLTVFEDKQILSEKIRHSNYPYSDQQIRKISNMRYRGWGRISKKLLCDIKVESTIYKSHQLHPYSILDLMWSTNNNFYSILHKDKYNFESILEDYNLGTDDKTDINELVDNIHTSPALKRGIIQSINIVKELVKFMGHAPQHIFLEFTREDKTSTLSESRKKRLKKLYNNLSEDTKKFKLDLRDYLVPDKSIQKELESHDKDLSKERLMLYFLQNGKSLYSDEALDINRLSEYQVDHILPRTYIKDDSLENKALVLAKENQRKADDLLLQPSIINKNMERWIYMKDHGMISPKKFKNLTRTTITEDDKVHFINRQLVQTSQIIKNVANILDNMYKEQGTTCVETKANLSSAFRTAFSEQDDKYHFKHPEFIKNRDVNDFHHAQDAYLACLLGLYRIQRFPSDEMLLIKKEYRKFFAQAQNSVKNHGKIPDSQKNGFILAPLVNGETLINNKTMETIWNMDYKRKVIKIFNYKQYNITKRTEIKTGEFYKQTLYSPHDENVKNPIPQKKNLDPKIYGGYSGVQSSYLAIIKVDQKKPTMVSVPIRFSKMIDDGKLSLQSWLENNIKHKKTIEVLKTKIPIGQLTYNPKNGYLSVQSEKEIANAQQLFLPFEHVALLTLLHAPTSEYDQILSFYDTDILLEIFDEITNKIKTFFPFYIDEQEYLVSIRENFQSATVIEKVNVLQQLLIMLHANSSRISIKLGEVSKKDLGRKKKRIPLENTDLVYQSVTGLYQTKFHID

SEQ ID NO: 812 - protein, 1058 aa, Novosphingobium sp.
MNGLVFGIDLGIASCGWAALRHPTSGDSSGEIVAMGSWMFDVPETDKERTPTNQVRRGNRLLRRVIRRRAQRMAEIRRLFTQRGLLAGNEPDALKRAGLDPWELRARGLDKPLSPAEFAVALGHIAKRRGFKSARKGKEANTAGDDQKMLRALEATRERLGRYRTVGEMFGRDADFRDRKRNRDGLFDRTQSRDDLIHEVGKLFEAQRRLGNDTASTALEAEFTAIAFRQLEMQDSEKLVGMCQFEPKEKRAARFAPSFEKFRLLGKLVNLRITTPEGERPLTPEEVRLATGDLGKTAKLSVKEVRKRIGLPADQRFTAFKPEEEAQDIAARTGEAMHGTRKLRDALGEVLWVELQDKPEQLDQIAHIISFHETADKIGEELRKLGLRAAAVDALLEDLAAFSRFKGAGHISAKAARALIPHLEAGLRYDQACEAVGYDHAASRWSKREQVADKAGFNALVKSMGDEIANPVARKSLTEGLKQLWAMRNRWGLPDAVHIEIARDVGNSLEKRNEIKRGIDKNTAERERQRDEVRELLGIEDVNGDTLLRYRLWKEQAGRCPYTDKAIPATAIIATDNSHQVDHILPWSRFGDDSYSNKVLCTARANQEKKGQTPFEWIMSSQGEDAWNTFLARIEGNTAFRGAKKRNYVLKNAKEAEERFRTRNLNDTRYASRLLAEAVKLFYPEGDRQEKGGNRRVFTRPGGLTSALRHAWGVESLKKVDGKRVEDARHHALDALVVAAIGEWEVQRLTRSYQEWEQKGLARPLRQVDPPWGDAASFRREVKEAYDSVFVARPERRRARGEGHAATIRQVKERDGALIVYERKAVIDLGMEKGKFSKAKALKQLSMLKDRERNLAVAEAIENWIERGRPVENPPLGLPVSKEPDAPRHPILKVRLATEKKPAVGVRGGVADRGEFVRIDVFTLPNKKGEDEFYLVPIYPHEVHSKTPPAAFMTTDGQEKSLTSDHIFKMSIYNRSYVEIEKRDGRVVAGYVVSFDRSVAALKIYEHHTLKPVEKSSGVKTLKRFSKYNVDRFGVRSEVKSEVRTWHGVVCTSPIPPD

SEQ ID NO: 813 - protein, 1281 aa, Candidatus Brocadia sinica
MENFILGLDLGTNSIGWAIIGCDENANPSRLIDANSRIFLSMMEADGKAPKNKQRRDKRLTRRQIRRHKERRDKLLEILVDQHLLPGEFHQPSDWPCLLNQKGKLPNGELKDFLASNPFLLRSEALERNLTRHEFGRVLMHLAKRRGYKSNRGIKYHALFRYIEENKIGIRYAVQGDEEQTETSEYANQHGDKKEAEETGKVWEGIRVLKRQMRSDETIGQFAVRVAHNEKWKIPRRLHTISMDETKIPTKGKSKGQGKTTAYHLHATRELYEDEFSRIWDRQAENFCHLLSQTPAQIKTLREKIEHAIFHQRPPQLQKGKVGMCTIRLKKKRAATALLESQEYLLLQDINNLKYGEVRGRGKRIQMDTHQPLSAGQRQQLLNALSDHKQVNEQNTLTWDRVREILELDASIKFNLEISSNKDKSGEQIKSGKKGITGNRTALAIARVIPEEWKVFTAAQKKSLVNDLLNIHDKVALFNRLRNHYRLPHQRCPWQFSDQQAFELATLELPAGYMKHCFEVITELLRHFRQGMIYSEAKKELEKDPKFKNQSESGQPRHLGEPPDIANPIVQKALYEIRRVVNAIIEKQGCKPKIIRIEMARDMKASKVHRAEMESRNIENRKLNEKAKEAIRDWNQHNPHQTMGLEPANIEKIKLWIEQRAKPDKESTTKIKLWQEQNHRCLYSGRYISFPQIADGEVDIDHIYPRSLSGMNNYLNKVLVFKSENLAKEQKTPWQKWGNSEKYNQIVKRAQEWYGGSDSPLKAKLYKVKNTLDETSFKEEMRKFTESQLNDTRYICVAVKNYLKTLGYTDQEIQVSRGRATADIRRLWELGNILPRAKRDQESKNEDKETDDNEIDEAEGDKTKKGKKKDRGDHRHHAIDAIITALTDRRTFADLQRRYRYYELNSSWPNAPLEKPMRADGKPWESLRHDVEQIVMNRVVSFSATRKASGGLHDEQPYGLGHYKEKMPIKKLLKSPDIIRTLPDKTPGKKLEDSNTWIADAFFRQKLLEWLVNWERAKCVKNFPPPLLPDGKPLDTVAVAHRCYVKRAPVVEALKRIENNPGKKTWVANDELRNILRNWLRQPGNSVKSAQVNPPTMPSKNGNGNPIHTVRLASVSTAMVQFKGKPQIFAKASNHHVAIFKRIGTVVERKGIFVDMLEAAKRIRKPPVVRKSPQELLALDPAVNPAEWQFEMFLCNNDMVLWDVDDPDWQQRDKIYLDEKNHHLPIYRLQKMTKGTLTFRHFSVTSTADTDNRGVLRRSPTKLRCKKIRINELGNYNICHD

SEQ ID NO: 814 - protein, 1383 aa, Kordia jejudonensis
MKKILGLDLGTNSIGWALVHEAENKNELSDIIKLGVRVNPLTAEEKTDFEKGRPLSTNADRTLKRGARRNLQRFKLRRKNLIEILTTHRIIDTHTVLTELGNYTTHQTLALRAKAAKHKIEKDEFARVLLAINKKRGYKSSRKVKNEDEGIAIDGMAVAKELYNQQLTPGQYVYQLLKENKKYIPDFYQSDLQQEFDAIWEFQQQFYESILTDELYTKLKGQGQQNSRKLFLAIHQIYTAENKGKRNDVRLQQYAWRNEALTKQLSIAEVAYVLVAINNEINKSSGYLGAISDRSKSLYFKNVTVGENLYAQLQKDRHTSLKNQVFYRQDYLDEFEKIWETQAQFHSELTAELKKEVRDVIIFYQRKLKSQKHLISDCQFEKGHKAIPKSSPLFQEFKIWQNLNHLEFEHTQTNEKIKFTEFEDEVRQFVFEELNLRGTLKSKELKKLLQLKTPNYWKANFEEIEGNRTNEVLYNVYQRIAEIEGYGFDWSKKTAEEIHTELAIIFKEAGINSEILTFDTTIEGNNFDKQKSYQLWHLLYAAEDGKKITEADRLLYGDTNVALKKKLHETYGFKPHYASLLVNVSFQQDYGNLSSRAIRKIIPFLIDGHGFSEAARLAKYNHSHSLTAEEQENRILNEKLSLLKKNELRNPVVEKILNQMVNLVNQVIETYGKPDEVRVELSRELKKSAKERADMTKHINEATAKNQTIRKLLQKGFGIQHPTKSDIVKYKLYEELSLNGYKTLFTNTYIPKEKLFSKEIDIEHIIPKAILFDDSFSNKTLAYREVNLAKADATAVDFITNKHTSDLDSYIARVETLYHSKKISKGKYKKLLISRSELPEGFIERDLRNSQYIAKKATQMLKEVFRTVHSTSGRITDKLRKDWDLINVMKELNLPKYQALGLTEKQIRKNGNSVEIIKDWTKRNDHRHHAMDALTVAFTTHDHVQYLNNLNAIYGLKDEEIDHNKSNLKGIKNKITKVYVKDGNKKRKFIPPLKNFRTITKDHLEQILISFKNKNKVVTKNKNKTKTSQKGVLNEKVQLTPRGKLHMETVYSHTKKVIVAQEKVSSKFTIEKVQQVTKPTYREALLKRLATYDNDPKKAFAGKNSLSKHPIYLDETKTKLLPEIVKTQYFEDNYTIRKEINPDNFKDEKSLLKIIDLDVQNILKQRLQKHNGNVKLAFSELEKNPIWLNKEKGISIKRVRIDGIKNAEALHSKKDHLGQPILTKNGKSIAVDFVSTGNNHHVAIYKDQQGKLHDVVVSFYEAVARVNLGIPIIDKTLNENLGWKFLFTMKQNEMFVFPSENFNPKAIHLKEQKHNTIISKHLFRVQKFSFRDYVFRHHLETELIDKKELKEITFFRLKSLKIVDQIVKVRINHIGNIVHVGEY

SEQ ID NO: 815 - protein, 1086 aa, unidentified
  source 1..1086: note = Verrucomicrobia bacterium IMCC2613
MSQVTGLPLVLAFDLGKGSIGEAVRLGNDFVHVASWLIPQDLAARGPSAKPGTPASRYRAWRTRVAHRERENALRRICADAGIEVLAAKRVARDAADKKKWIVVSKADERLTREFPKKGDSTCYNSALLRIQLLRGVKLEGWQVFKALHAAIQRRGYDNAVPWKHRAVRDTETEEDGITQQRADSYCLALEQMAPNKPECQLPSYLDAHRLGLWDASRPDEYILRIDHHVAPARNREHPDNTPIVAPRELVIKETRALLTAAAKFFPKLAGREDEILFGRGGKAYASYFDDVRRAHSLRLGGANDWDGILGQKVPRFDNRIIAKCALIPRLNVCKATTRKDKTGAIISESLLPSEVTFLFKLKNVRVQRPDKSITGLKPDEIRTLFNDPKREPEKLSYTKKQWSKEIARFGCEAAAGHEEIAAPSFGGRSRFCRPALEILKKLILSGESPATAHSRELAERVKGNTNPQQGLVVSDLDFLSPARIGETWDGIHVADQQHGALLRLAAEQGPEVAIRALIGKVNNPVVRHRLEAFWGRLRAIEADLKKRFGRGPDEIAIEFIRTDFMGPKAKLALAKFQSERAEAREDARAQVGKIGADGRASPLKYELWKAQGGICLFVGESLAPTDIESLEIEHIVPRSQGGSDAFINYVVTTKATNKLKDNRTPYAWFEANGFTGWDAYVKRVEACATALRNKKVRLLTAPDAIELVERYTALAETAYIARLAQTVAALHFGWPINSQPGERRITIVNGGLTARVRRNYRLNSLLNPCPTGKDQKEWEEDADVEKNRKDDRHHALDAMVISFIPAWTRDPKKEKFFRLPDGVTPETFQERLEEVLPRQLHYERSELEATAFGQRTLGGKLYGVARVDFCNLVVKVALNGNRSLNIKPDGSGEADTIVDQAIRRDVQAFIDQNRATITLAIWDAWVSSYHRGGSNGPLVKKVLVTITNPDSLEEYADLAKDQSGQLRRGKKHKGYWILRILSPTKKDPTKTTLQVRPIYAHANPHALKAEIGEDHGCEIILELESGCLVQIDKPIAHAKTPLAAGIYKLNSVWTQGNVVVSSQSGVTSAPIGLAKFIEAGLRRLK

SEQ ID NO: 816 - protein, 1269 aa, Elizabethkingia anophelis
MKTIMVKNILGLDLGTNSVGWALIEVDENNLPIRIIAMGSRIIPLSTSDKEEFQRGLSITKNQSRTVSRTQRKGYDRKQLKKSDLKKILNKYNIFPSEELLRLPMLDLWKLRSDSANPDENISAEQLGRILYMLNQKRGYKSARSEANADKKDSDYVQAVKGRYDQLKDRKQTIGQYFYDELYNANANNSYFRIKEEVYPREAYIEEFDTIISAQREKHDFLTDEVVHQLRNEIIYFQRKLKSQKGLVSICEFEGFEKTVFDKEKNKNKVFFVGPKVAPKTSPLFQLCRIWEVVNTITLKIKNPEGSKYKWGEKIPDLKEKEILADYLFKNESLSFSKLLEILELKKENVYVNKQIQKGIKGNETYSALHSILGDNELLNFDVSIMTSNQTALLVDRKTGEILEERAGLELDASLEKEPLYQLWHTIYSLKDLDECKNALIKRFGFDEETAEKLSRIDFNKQAFGNKSNKSMRKILPFLMEGYDYSQSSSLAGYNHSNSLTKNEREQQITLDRLELLPKNSLRQPIVEKILNQMINVVNAILEQYGKPSEIRVELARELKQSKEERNETDLQNSKNKKLNDEIGKRLAELGLPVTKRYIQKYKFIFPSLSKNLKEAYVNNQCIYCGETFNLTEALSGDAYDVDHIVPKALLFDDSQTNKVLVHRKCNSTKTNQTAYDYIATKGEEEVRVYSERVDDWLKRGIISYSKMQRLKVSHKEYLERKKLGKETETDRKLWENFIDRQLRDTQYISRKSREILQKVCNNVTTTEGGVTAKLRNLWGWDDVLMNLQMPKYKELGQTITKEWTSEHGKRKHQKEEIENWTKRDDHRHHAIDALVIACTKQGFIQRINTLNSSDTKDLMIKEVEEAKVEFNEKTTLLEKYLKTQKPFSTHEVMKEADKILVSFKAGKKVATITKFKATGKNKETGVIVPRGALHEQSVYGKIKVIEKDKPLKYLLENSDKIVNPRIKNLIEIKLSENKNDPKKALLALKKIPIFLDEEQSITLEKASCYNNATVLKYKLQNLKAAQVDDIVDEKVKKIVRERLSQFGNKEKEAFKDTLWFNEEKQIPITTVRLFARPDANNLQTIKKDEDGNGIGFVVTGNNHHIAIYEDKDNKLVQHSCTFWHAVERKKYNIPAVIRNSADVWSQLLGKELPESFLDKLPADELNLKLSMQQNEMFILGLSQDEFDEAIANNDKSLLSKHLYLVWSISNNDYYFRHHLETKNTELKNIPTAKDAKRYFRFKSVGALVGINPVKVRLNHLGEITKIGE

SEQ ID NO: 817 - protein, 1371 aa, Lacinutrix jangbogonensis
MKKILGLDLGTTSIGWALVNEAENKSENSEIIKLGVRVNPLSIDEKTNFDKGKPISTNADRTLNRGARRNLQRYKQRRENLFEILLDNKLITKETILTETGNNTTHETLRLRAKAPNERIELDELARVFFSINKKRGYKSSRKAKSEDEGNAIDGMSIAKELYENNITPGQYVYELLLNKKKYIPDFYRSDLQNEFNIIWEYQKQFHSNVLNDEMYKKLEGQGQQNSRKRFLAIHGIYTAENKGKRDAIKLQHYKWRAEAITNQLPIDQVAYVLVEINNNLNKSSGYLGAISDRSKELYFKNETVGENLHRQIKENNHTSLRNQVFYRQDYLDEFEQIWVRQAKYYSELTLELKNEIRDVVIFYQRKLKSQKHLISNCQFEKQHKAVPKSSPLFQEFKIWQNLNNLVFKNTRTKEKCVLDDDLRISLFEELNLRGNLTEKTILKFCNLNSTWKSNFTKGLEGNNTNKALYNIYQHIATEEGYGFDWEKKTTKEIKEELKSIFPRINIDTTILNFETNIEGQTFDKQTNYQLWHLLYSAEDDTKILEEDRLVYGNSNVALKKKLHTKYGFKPEYATMMANVTLQDDYGSLSSRAIRKIIPFLQEGNEYSESCALAGYNHSSSLTKEELEKRILKPRLEILQKNSLRNPVVEKILNQMVNVINQIIDEYGKPDEIRIELARDLKKSAKQREETTKFINSATKVNDDIKSVIQKEFGFTPTKNDVVRYKLWLELKNNGYKSLFTNKYIPKEDIFSKNIDIEHIIPKAILFDDSFSNKTLAYRAVNLKKADRTAIDFIEQDYSNEDINKYRLRVESLYKNGDIKKGKYKKLLMSLANLPTDFIARDLVNTQYISKKAKSMLFEVFQNVVPTSGRITDKLRGDWDLINVMKELNLHKYRSLGLTEIQERKNNVKIEIIKDWTKRNDHRHHAMDALTVAFTTHNHINYINNLNASRNKESHLFSIKNTITKVYEDTTGNKKRNFIQPIENFRTEAKKHIESILISFKNKNKVVTKNINKSKLKGKDNFNAKPQLTPRGQLHKETVYGTSKREMDKPIKLSKKFKIETLKLIVNSNLKTVVTKHLHKYNNKPEIAFDSKTIKKDPILYKGLQLTEVLCFEEIYTIRKVVSPDNFKTEKDLNKIIDKKTQEVLKNRLNEFGGKPKEAFSDLDKNPIWLNKEKGISIKRVTITGVSNAEPLHYKKDHFGSEILDKKGNKQAVDFVSTGNNHHVAIYKDDKGKLQEKVVSFYEAVARVNEGLPIINKEYNTGLGWEFLFTMKQNEMFVFPNDDFNPIEIDLLDEKNEILISKNLFRVQKISTKNYMFNHHLETQVVTSEILKTKKQLSGITYHFIQSTEPLRNIIKLRMNHIGKIVYVGEY

SEQ ID NO: 818 - protein, 1516 aa, Prevotella sp.
MKNILGLDLGTNSIGWSVIQEKHNENNECQKLILGAGSRIIPMDAAVLGDFAKGNTISQTKDRTQYRGVRRLRERCLLRRERLFRVLDIMGFLPQHFSNALTRYGKFKDADEEPKIAWRKDDEGKMHFLFADSFNEMIEEFRSVQPELLKRGMKVPYDWTLYYLRKKAMREAVTPFELAWLILSFNQKRGYYQLRGEEEGEADNSKSEEYLAQRVVDVIDTGEKKGKSTWFDIVLENGMVYHRPAEIKPDWIGKTKEFIVTTQFDKDGNPKKDKEGNVKMSFRMPNENDWNLQKKKAEKDIDESGMTVGEYIYNALLHNPKQKIKGKLVRVVERKYYKNELQKILESQKRFIPQLSDSALYEKCIKELYQSNEAYRNSISTRNDFTYLFVDNIIFYQRPLKSKKSLIDNCPYESLAYTKDGEEHKAPVKCIAKSHPLYQEFRLWQFISNLRIYQRQKQVGDKVKLDVDVTDEFLPTDDRRESLFDYLNDKTEIKQDVLLKEFFSMKKPKGKDSVYPYRWNYVEDKSYPCNVTRGKILAKLNRAGISADFLSSNGNEESLWHILYSVEDKGELRKALARFAAKNGLDDAFTEALADIEPYKKEYGAYSAKALKKLLPLMRLGKYWNYDNIAPATKARISKIIDGEYDENIRNRVREKAMSLNSASQFQGLPLWLACYIVYDRHSERADSGRWSSPEDIDKYLSDFKQHSLRNPIVEQVVTETLRTVRDIWKRYGEISEIHVELGREMKNPADKRSKMNRRMLENENANMRAKLLLTEFMNPEFGIENVRSYSPSQQELLRIYEDGAISNAGSEIDDEISDIMSRLSQVDVKKQPTASEVKRYILWLEQNYRSPYTGQMIPLAKLFTPAYEIEHVIPQSRYFDDSFSNKVICEAEVNKLKDRMLGYEFIKQHKGEKVSLSMGGTVEILSPEEYVRHVESQYKNNKAKMRKLLMDDIPDEFINRQLNDSRYISKLIISLLSNIVREEGEEEATSKNVISCNGSITDRLKKDWGINDVWNHIILPRFRRLNELTGTDKFTTSNKEGHEVPEMPLELQKGFNKKRIDHRHHAMDAIVIACITRDHVNLLNNEAAMSKNNANRIQLSKKLRRYESVEIEKDGIRKQISMAKEFKKPWEGFTADVERTLRDIVVSFKQNLRVINKTTNYYQHFKDGKKIYSPQSKGDSWAIRKSMHKETVFGEINIRRIKEVSLKEAMKRIKDIADKELRSKIVELMALQYNEKKIKQYFSDNKDEWSDVNPKKIKIHYFTKETNERFFATRKPLDTSFDKKKIKTQVADTAIQKILLNHLSAHGDKAETAFSPDGIDEMNRNIIELNDGKFHQPILKVRIYEKADKYAVGQQGNKKKKYVEAAKGTNLFFAIYAEEKIDEKTGDTVITRTYDSIPLNVVIDREKRGLSPVPENENGAKPKYVLSPNDLVYVPNEEERETGRICEPLDKERIYKMVSSNKKQAFFIKSEVASTIVDKFEFSALNKQERALSGEMIKEICIPISINRIGEITLR

SEQ ID NO: 819 - protein, 1056 aa, Endomicrobium proavitum
MPKQELVYSFDLGSGSIGVCVRSGKNILHLNSLLLDNEFASVKEAAAQRRQIRTRIAHKEREKWWNEQAKKAGIEVLQTAQPTKENPNLKPDSRMLIEFLPKNSKDKTIYSSHLLRIALLQGIKLESWQIYKAIRSAIQRRGYDANLPWATDYDSDTKANSDAATRYEEKLKEFFADKEEYYYPCYYEAYIQSIWSPSNPKDLSGRLSENPSPARNKDNKPQEDKCFPSRDLVEKELKDLLSAAAKLFPKLKDKENYVLYGQAQRAYASYEYKKDIDKENYISHRGTSWDWQGLLGQKVPRFDNRIIAKCRLIPRFNVCNAKKQINKEVSFLLALKNMRFTLDNTTTQSLNCAQINEIFKTYAEFCEYEKQKETAVAKKQNPCTKTFWKNYVHALGGEVNPGQQEIAKPKEGGRSSFCKPALNILHSLILSGKTPHNYYAELVEQTKNTDLQKGLIKDDYRFLLNMPNDWNSISIQDTREEDKKLSQQEALRKIDEIIAGVNNRIVCHRLLMLKQVLQKLDDQFNKEYGVPDKVVFEIAREDFMGKKKKDEYLKKAKDGKKNNDDAVKKLKDMGLPVSDPNIIKIKLGNEQKWKDIYDTSDKRNLIPENIGQYEIDHIVPRTSSKGGSDSFVNFILTKNALNQTKKDRTPYEWLSSDNSKWQAYLANIADFSKSANSKKIELLTSDKAENIEKRKTDLQATSYLEKLAQTIAGLYFGFGINTKDDKKRILFFTGGETATVRSKLDLNRVLYKNDEEFEKAQKAGLKEKNRKNKKHHALDALVLSMLPEIKVSKREIIEKPDYFHKDYCVKQLKSIIPQTIKQIKPKLRATIYALRSRYENGKPYYYFISRFNSNLTLFEKMEDAKKEITNIFDLKIKNDWKVKLEEKGLTQEKWIEFLNKYTNNGKRIKQIAMTDSKAFKKEETFNSNGIIKNVIGEYGSNGVKGQWIKGKEGHQGQIVYKDEKGKWRVEPVYVFESIYNKKKLYENKYKDVRFLKSGQLVELKKDYENIKAGIYILRTLKSNGSCKLEDINTQEEIDKSVNVLIEQCGMRSYEKK

SEQ ID NO: 820 - protein, 1069 aa, Spiroplasma litorale
MKKVNIGLDIGIASVGWSIYDIDNKKIINAGSRLFSESNSGSSNSSTTSDRRMQRGRRRNLRRLILRKQDLLKLFVKYNYLNKTNDFYNLNLNINYLEMRKKALKEKIAQEELIVLLFNYIKKRGSFNYKDDLLESKKDKFDDISIDDIKKETNLLPVEIQTNIFNEYGKYRGVKETDSLIAHEWYKKELEQILNKQVEENVVSQSFVQEYINLFDRKRLYFEGPGWTTSSKTSKSEYGWKDENEFYSRLTGFDTYNSNEKRAPKHSMTSYLFNILNDLNNINIDGIESGLTYDQKYELIESVINHNGPKNKNITLKLISSLLKVKESDIKGYRIDKENKPNFTKFEFINKLRTLLINSKLDISFISLKNIDLLDKISEILTIYQTAESRKEKLLIDCDYSFSNEQAEVISFISLTGTHSLSFKTMKVAIDEMWYDNKNHMQIFAEKNIKPDYNIKINRKFNSMPLLRQKISEMYISPVVKRSLIESIKIIKEIEKIKDLQIKDIVIELARESNSSDFKKYINEIQKKNEIENKEILEKHKVSLLKKDFKTRLKLILFNEQDGRCAYSGTPIDIDRLYSDPNYCEIDHIIPFSVSLDDSRTNKVLVLWKENQDKGKKSPYQYFRDKNRNWNEFKEKMYSLYVKNKKLGKYGNKKYSNLVLEEDINDVEVKQKFINRNLNDTRYATVEVKNYLTFFKKELNKSYSIKTINGGLTSYIRNVYLKLPKKDRDDYKHHAIDATICAIAPIIDLAEGKTLNKILDSDDENIVLKLEELGDLKNDINNFAYKFTKKVEKKSNTQLFNESIYRCINDNGNLIKTEKIDLLSLEPPKIKIIKELFTTNKNKLLIYESDKKTFDYLENIYKAYVNDVDKNDKPVKNPFYHFVNELGERITKQSNENTPPSIRYLRYKGSVINQYTKITHKFNKIKANKEIVMIGSNTIGWDLFYSKVYNLYKVLPITHNVAYFESNKSSSNIKYKLKKYESEKILYKIDETYEKKFTLHKNNELVFDYDGQKFNLIVVGFDKTHERLEFKYLYKKVDDNKRLHKTVKKMKNIKLITSNSTRTKVKIID

SEQ ID NO: 821 - protein, 1058 aa, Staphylococcus schleiferi
MKNSYILGLDVGIASVGYGLIHSDSKSVIDAGVRLFPEANVENNEGRRAKRGSRRLKRRRIHRLDRVKNLLAQYHLIIDDKIPKSTNPYAIRVKGLSSPLSKSELVIALLHLAKRRGIHNVNVVMDENESTNELSTKEQLKENAKQLENRYVCELQLDRLNEQYKVRGERNRFKTEDFVREARQILTTQQKYHDIDEHFIEQYTHLLETRREYYEGPGKGSQYGWDGDLKQWYEMLMGRCTYFPEELRSVKYAYTADLFNALNDLNNLVIARDENEKLEYFEKYHIIENVFKQKKTPTLKQIAKEIDVKESDIKGYRITKNGKPQFTSFKLYHDLNKIFLDKKNLENIELLDEIAFILTLYQDPLSIKEALDQLQDLLTESEKEAIAHLNGYTGTHRLSLKCLHLLIDEMWQTSRNQMEVFTALNLKPQKYQLSKQKQIPKNMVEAFILSPVVKRSFIQSIEIVNSIIKKYGLPEEIIIELAREKNSEDRRKFLNRIQKENENTRKQVEEVIREYGNRNAKGLVEKIKLHQMQEGKCLYSLQNIPLDDLLRNPSHYEIDHIIPRSVSFDNSFNNKVLVKQEENSKKGNRTPYQYLNSNESVLSYVQFKQHILNLSKSKERISKKKREYLLEERDINKFEVQKEFINRNLVDTRYATRELVQLLKSYFSANDLDVKVKTINGSFTNYLRKAWKFDKSRNKGFKHHAEDALIIANVSYLFKQSKELKEANAILENNNLSLNKNKDSKNLLTEQDYRKMFEIPKQVQDIKDYKDFKYSHRVDKKPNRQLINDSLYSTREVNENHYIVQTVKDIYAKDNTKIKDLFLKTPEKLLMYKHDPQTFEKLMLVIKQYGEEKNPFAKYYEENGEYLTKYAKNDKGPTIKRLKYIGKKVGTHLDISRNFSDAKRKVVQLSIKPFRFDVFHSKAGYHMLTLTYMDIKKKEKHYQILKNEYQALKERYKVPSDAQFIGSFYYNDLISINDELFRVIGVNNSTRNIVELNMVDINYKDYCDLMGIKKTPRIFKTIAKKTEKIEKYSTDILGNQFKVKPSKSPQLIFKRGVL

SEQ ID NO: 822 - protein, 1536 aa, Parabacteroides sp.
MIIYFIFEKIVNTILVMKKIVGLDLGTNSIGWALINAYIDEYNKEHLYGIEACGSRIIPMDAAILGNFDKGNSISQTADRTSYRGIRRLRERHLLRRERLHRILDLLGFLPKHYSDSLNRYGKFLNDIECKLPWVKDETGSYKFIFQESFKEMLANFTEHHPILIANNKKVPYDWTIYYLRKKALTQKISKEELAWILLNFNQKRGYYQLRGEEEETPNKLVEYYSLKVEKVEDSGEKKGKDTWYNVHLENGMIYRRTSNIPLDWEGKTKEFIVTTDLEADGSPKKDKEGNIKRSFRAPKDDDWTLIKKKTEADIDKIKMTVGAYIYDTLLQKPDQKIRGKLVRTIERKYYKNELYQILKTQSEFHEELRDKQLYIACLNELYPNNEPRRNSISTRDFCHLFIEDIIFYQRPLKSKKSLIDNCPYEENRYIDKESGEIKHASIKCIAKSHPLYQEFRLWQFIVNLRIYRKETDVDVTQELLPTEADYVTLFEWLNEKKEIDQKAFFKYPPFGFKKTTSNYRWNYVEDKPYPCNETHAQIITRLGKAHIPKAFLSKEKEETLWHILYSIEDKQEIEKALHSFANKNNLSEEFIEQFKNFPPFKKEYGSYSAKAIKKLLPLMRMGKYWSIKNIDNGTRIRINKIIDGEYDENIRERVRQKAINLTDITHFRALPLWLACYLVYDRHSEVKDIVKWKTPKDIDLYLKSFKQHSLRNPIVEQVITETLRTVRDIWQQVGHIDEIHIELGREMKSPADKRARMSQQMIKNENTNLRIKALLTEFLNPEFGIENVRPYSPSQQDLLRIYEEGVLNSILELPEDIGIILGKFNQTDTLKRPTRSEILRYKLWLEQKYRSPYTGEMIPLSKLFTPAYEIEHIIPQSRYFDDSLSNKVICESEINKLKDRSLGYEFIKNHHGEKVELAFDKPVEVLSVEAYEKLVHESYSHNRSKMKKLLMEDIPDQFIERQLNDSRYISKVVKSLLSNIVREENEQEAISKNVIPCTGGITDRLKKDWGINDVWNKIVLPRFIRLNELTESTRFTSINTNNTMIPSMPLELQKGFNKKRIDHRHHAMDAIIIACANRNIVNYLNNVSASKNTKITRRDLQTLLCHKDKTDNNGNYKWVIDKPWETFTQDTLTALQKITVSFKQNLRVINKTTNHYQHYENGKKIVSNQSKGDSWAIRKSMHKETVHGEVNLRMIKTVSLNEALKKPQAIVEMDLKKKILAMLELGYDTKRIKNYFEENKDTWQDINPSKIKVYYFTKETKDRYFAVRKPIDTSFDKKKIKESITDTGIQQIMLRHLETKDNDPTLAFSPDGIDEMNRNILILNKGKKHQPIYKVRVYEKAEKFTVGQKGNKRTKFVEAAKGTNLFFAIYETEEIDKDTKKVIRKRSYSTIPLNVVIERQKQGLSSAPEDENGNLPKYILSPNDLVYVPTQEEINKGEVVMPIDRDRIYKMVDSSGITANFIPASTANLIFALPKATAEIYCNGENCIQNEYGIGSPQSKNQKAITGEMVKEICFPIKVDRLGNIIQVGSCILTN

SEQ ID NO: 823 - protein, 1090 aa, unidentified
  source 1..1090: note = alpha proteobacterium AAP38
MRWRLGLDMGAGSLGWCAVGLDDQGYPDSILAAGSHIFGDGRAPSRGDQQGTPLGVERRAAKAMRRRRDRFLGRQAKLLARLTLAGLFPADPVRAKALELLDPYVLRARALDEALPPHQLGRAFFHLNQRRGFKSNRKTDRGVDDEAGKIAIGIDRLRAAIAAAEARTMGEFLHKRRQSAPDVNQIPSVRTRLRPETGEEAKGDGYDFYPGRELVEEEFDAIWDAQAPHHPSLLTPDNRALLHEAIFYQRPLKAPKIGKCTLLNNEPRLPKAHPLFQRRRLLEEVNALRIVRPGEVATKLTCEQRDLLMLKLKDKAKVSFETLRSKVLKLEPEARFNKEGENRTELVGDEVCAQMSAKTRFGKAWAHFTDEKRWAILSRLIEEEDEERLDTWLRTEHGLDAEQARAVAGARLPAGFGRFGETATRRLIAALQAEVIVYSEAVVAAGLGHHSDMRTGEVLAELPYYGMTLERHLLPGTGDKADPEELRIGRLTNPTVHIALNRLRRIVNRLIKTYGRPEQIAIELGRELKLTDEDKQRLSRQNNRNRADAEARSKKLAELGQADNGANRARLKLWEELNRENALDRRCIYSGQQISIAMLFSDAVEVDHILPFDATLDDSNNNRILCLREWNRRKRKQSPYEAWGHTDYWPDIAARAARLPKEKRWRFEPDAMQRFSAEDRFIARHLVDTQYMSRLAREYLEALYPEKGEGSGHVWVSPGRLTELIRRKLGLNELLPDHNFAGVKNRLDHRHHTIDAFVVAVTDRSLLQGISRASALEGEEGRERVIVPEPWDGFREALRTTLNTITVWHRQDHGTASKAGLAQGRDQTAGKLHNDTAYGLTGRQDTKGNDLVVSRKPLMSLKPADIEPVPDVAPITKGVRDRDLRKALAHFTQATEGKGFLQALERFTRLGPLHFRGIRRVRLIQPLAVIPIKGPGGVPYKGYLGGENFRCDVWEMPDGAWKPEVTSMFQAHQPGWTSAIRAACPTARKVLSLHKRDMIAIEREEGVRTLMVVAQIWSNGQVTLVEPHEAGDLNKRNKSEDDPFGYFMPTAGGLKRLKARQVRVDELGRVQDPGFPARKARRRTRPKQVD

SEQ ID NO: 824 - protein, 1409 aa, Riemerella anatipestifer
MKTILGLDLGTNSIGWALVKEAENSNEKSEIIKLGVRVNPLTVDEKTNFEAGRPLSTNADRTAKRSARRNLQRYKLRREDLIELLIKHQLIDKDTPLTEIGKNTTYQTLELRAKAARERIELEDLARVFLAINKKRGYKSSRKVNNEDEGQAVDGMAVAKKLYDENLTPGQYAYELLSKGKKYVPDFYRSDLQAEFDRIWEYQKQFYTDILDDELYNALKGQGQQNSRKRFLAIKGVYTAENKGKRDEVKLQHYKWRSEAISKKINIEEVAYVLVEINNDLNKSSGYLGAISDRSKELYFNKETVGENLWKQIQKNPHTSLKNQVFYRQDYLDEFEQIWETQAQFHPQLTLALKEQIRDVVIFYQRKLKSQKGLLSFCQFESWEIERKDENGNVILNKSTQLPKRQTVGRRVAPKSSPLFQEFKIWQNINNLEVIKISEGVSKNKKETETLSDDERKLLFEELNLRGNLSQKEVLQILGLKDKEYKTNFPEGLEGNRTNAALFNVYKAIAENEGYGFDWEKKVAKEIREELKAVFSQIGIQANILDFNANLDGKEFENQASYQLWHLLYSAEEDDKINEEDQIIYGNSAVSLKKKLCEKFGFTPEYAKWMANVSLQDDYGNLSTKAMRKIIPYLIDGNDYSEACALAGYNHSNSLTKEENDNRELLNKLELLPKNSLRNPVVEKILNQMVNVVNQVIETYGKPDEVRIELARELKKSAEERAEMTKGINEATRRNEDIKKLITKDFGIPNPTKSDVVRYRLWEELAPLAYKDVFTGKQIKKEDLFSSKIDIEHIVPKALLFDDSFSNKTLAFRETNLKKGDRTAYDFIESDYNATLDDYIQRVETLYNNAKGTISKGKRNKLLMAQKNLPDGFIERDLRNSQYIAKKAKAMLYQVFKDVNVTSGSITDRLREDWDLINVMKELNFPKYKALGLTEIEERYDIGQEKTKKVEVITDWTKRNDHRHHAMDALTVAFTTHSHVQYLNNLNTIHSLKGDEVDLELSKLYGLKNTITEVVNKKRKFIPPMPSFREEAKKHIETILVSIKNKNKVYTKNINKTKKESGYHTKEQLTPRGQLHKETVYGKSKRPMNKPTKINKNFSLKQAQLIINVQEKELVLHHLAQFDNNPEVAFDTKTLKKTPLLKNGEPLKEVLCFEEIFTIRKDITPDLKIEKVVDEKIKAILEQRKKDFGGNTKEAFSNLDKNPIWLNKEKGICIKRVTITGVSNAEALHHQKDHLGREILDDNGNPIPTDFVSTGNNHHLAVYLDSEGKLQDNIVSFYEAVVRTSQGLPVVDKGLNKDLGWKFLFSLKQNEMFVFPNDDFDINDFDLLDDNNAELISKHLYRVQAISKVPVGNSFARDIIFRHHIETTVERKKELKDISYIQLKSLEGLRNIKKVRINHIGKIVQVGEY

SEQ ID NO: 825 - protein, 1358 aa, Lactobacillus pentosus
MNEPYGVGLDIGTNSVGWTVVDMNGRVRKVKGKTALGARLFKEGATAEDRRGFRTTRRRLKRVKWRLRLLREFFDQPISKIDPNFFARRKYSDISPRDPNYNGLAKTLFNDRTDQEFYHDYPTIYHLRDKLMTSDRKFDIREIYLAIHHIVKYRGNFLRTGPASQYGSASLHLATSFQKLNDLFAQSEESLNFKLVTDEAQLQQIQQILVRTDLSRSEQQRQIWPLMVVLMGATAAEKKRQKDFAKELANALVGLKAKLNVVTLTNVDTTVVKDWTFTLEESQDKLPEIEEQLSEVGQQIMDEVIQLYASVNLAQLIPAGKRFSQHMVEKYNHHEKNLELLKAYIHSQSDSKRGREIRATYDRYIDGVKSKPVTQEMFYKDLMKYVEADATSNHLAAEIKDEIDSEQFMPKLRTKQNGSIPYQVQQYELDQIISHQKKYYPWLGEENPVAERRGKFPYKLDELVGFRVPYYVGPLITKEDQQATSGAGFAWMVRKADGPITPWNFDQKVDRIASATAFIQRMQTTDTYLIGEDVLPARSLIYQRFMVLNELNNMRVEDQKLAPRQKQRLYNQVFKQHQHVSVKNIQQNLMDAGEYRETPKITGLADPKGFNSSLSTYHDFKKILPEAIADEHKRADIEKIILWSTTFEDSAIFKQKLEEVAWLTDAQRKQLSGLRYRGWGQLSHKLLTAFKDDNGRSVMDGLWETSDNFMQLRKQPAIETQIKEANQANLTDADIQDTINELYTSPQNKKAIREVMLVLDDIKNAMHGQTPSWIFIEAARGGGVAGRRTQSRSKQIVEAYKSTAKEIVSEKVQHELNEKIKAKADFNTRLVLYFLQNGRDLYTNEAINIDRLSEYDIDHILPQSLVKDDSLDNRVLTSARINREKNDTFASEKFGRKMGAQWRELHRNGLMTQRKLKHLLMRPDEISKHATDFINRQLVETRQVIKLVEELISSEYPSASIVAVKANLTHQFRQTFNFPKLREVNDYHHAFDASLTAFIGMYLLKQYPKLERFFVYGKFAKQPINLTRFNVIRKLAVAEEPIANIETGEILWDKTADIKCFEKLYNYKRLLVTHEVRENYGAMFDQTIFKATDSRKRLIQKKKGFATETYGGYTGRTLAYLAIVKVVTNKDTQYQVVGIPTTMVTQIQQLEASGLTSKQAVTKAIGAMINENNKKLQSYEVLLPKVRFEQVVRDEVKGHIHRFALGTDTYYHNIQELYLPLTIQRAFLGKRNDTDAQTEQNLLTVFETTLAQVNRYFPLYEMNKFKQILNSAQEKFAALPTKNKTVKNKLVTGKDGVLNNLFIGLHANASLGDLKILGMKTGFGKLQVPGGLKLTDQAEIIYQSPTGLFERKVALKDL

SEQ ID NO: 826 - protein, 1078 aa, Neisseria sp.
MKQQPQRYILGLDLGIASVGWALILVDEEGNPIGLLDCGVRTFERAEVPKTGDSLALARRQARSVRRLIRRRAHRLLRLRRLLKREGVLSAADFNSDGLPNLPIDTWQLRVAGLERKLTNQEWAAVLLHLVKHRGYLSQRKSETQTENKELGCLLASVAKNSKLLSENANQYRTPAELAVRLFAEQSGHLRNKGGDYTHTFNRLDLQKELHLLFEQQRTFGNPFASAELQSKVDGLLMMQRSALQGEAVLKMLGKCTFEPSEYKAAKHTYSAERFIWLTKLNNLRILENGTERALNEAERKLLLDEPYKKAKLTYSQARKLLDMSHDATFKGLRYGKDSEGLNAENGALMEMKAYHKIRTVLDKAGLKGEWENRIRNPEILDKIGTAFSLYKTDEDIQAALADLRLPENVLNALLAGLNFDKFIQLSLKALSNIMPLMERGIRYDEACKEVYGDHRALAESKNQMLLPPIPANEIRNPVVLRTLTQTRKVINAIIRRYGSPQRVHIETARELGKSFKDRKEIEKRQEENRKERERAAEHFKELFPHFAGEPKGGDILKLRLYEQQQGKCLYSSIPIDLGRLNEKGYVEIDHALPFSRTWDDSFNNKVLVLGSENQKKRNQTPYEYLDGASNSQRWREFQARLQGCRFSYAKKQRIQTAKLDSKTEQGFLERNLNDTRYIARFLCGFIEENLHLQGEGKRRVFASNGQITALLRGLWGLKKVREENDRHHALDAIVVACSTVSMQQKITKAMQRRETLETVDTETGEVKTRIPQPWDFFRQEVMMRVFSDTPHEELAEKLSGRPEALHDFVSPLFVSRAPNRKMTGQGHLETVKSAKRLSENISVVRKPLTALKLKDIENIVGYPDREPALYQALRERLQAYKDDPVKAFAEPFYKPAKNGGQGSLVKAVRVKDVQKTGVMVRKDRGGIARGIADNATMVRVDVFGKKGKNYLVPVYAWQVAKGILPNRAVVAYADEADWDEMDDSYEFKFTLYPNDLVEIISKKGRIFGYYSGLNRATGAIDIKEHDLSKEKAKNGIHQSVGVKTVLSFQKYQVDPLGKEICLCKVEKHPELNSKKKK

SEQ ID NO: 827 - protein, 1029 aa, Pelomonas sp.
MKYRLALDLGSTSLGWAIVQLNAKDEPCAIVRAGVRIFPDGRNPKDGSSLAVTRRNARAMRRRRDRLLKRKARMQRLLIEHDLFPADEAARKALETLNPYELRAKGLDAALTPAEFARALFHLNQRRGFKSNRRTDRKDNDSGALKAAIGGLRAQLDTAGADGRARTVGELLWRRMSDPNVLTVRARYREQRITKDDGKTRVDKSYDLYVDRAMVEAEFDALWAKQAELSPTQFGEAARATLKDCLLHQRNLRPVRPGRCTLEPDEPRAPLALPSQQRFRILQEVNHLRLLGGRLLEESLSVEQRDKLVAALEDGSKSFKTAIPKLLGLPGTVQFNLADAKRTELKGNATSMLLGKKDFFGPAWHGFSEARQDEIVMRIQEEESEARLVDWLATSTGVDEAHALKIANAALPEGYGSLSAKALAKILPAMRAEVITYDKAVLAAGYDHHSHISHAASTGEILPELPYYGEYLQRHVGFGTGELNDTPEKRFGRIANPTVHIGLNQVRVVVNALIKRYGHPTEVIVEVARDLKQSQDQRRETQEQQAKNQKRNERLRKDAAAILGIADERVRLADIQKLILWEELSFDIADRRCPYSGVQLSAAMVLSEQVEIEHILPFSMTLDDSLNNKTVAMRLVNRLKGNRTPWDAREAFAGQGWDYDGILMRAERMPRAKRQRFAPDGLEKWLKEDKDFLARALNDTRHLSRVAREYLSLVCPASTRVIPGQMTAMLRAKFGLNDILGLNGEKNRNDHRHHAVDACVVAVTDQGLLQRFAQASADARGKGLDRLVETMPDPWDSYREHVQRAVNSIWVSHKPDHGFEGAMHEDTTYRPPHLDPKNMWRTRGIGGGKPNEKEADSKAMVGFTGPEHLQRHHRDKAGQQLPYKGYVASPKFCMDIVRNDKGRWEGEVVSTFEAYRLVSEFGRDAALAHIQSKSRSISGKPLVMRLQGGDMVRFDDDEGRPVVLRVVNMTGNGQIFFAPHNEANGDARNRDKQDQFVYLSKYAGSLQKARGRRVTVSPAGELRDPGFKE

SEQ ID NO: 828 - protein, 1100 aa, Devosia sp.
MGATIVTDISRSAFAFDIGTKSIGSAVLRLDDRGEPIGIINAAVRIYADGREPKSGTSLAEGRRLARGMSRRRDRYKRRRRTLLNTLTEFGLMPPTDEARKALLAETNDRRFGAVAGNVYALRARALDEKLPLHHLGRALFHLNQRRGFKSNRKTDKRDNDQGKIASGISRLGQKLDEAGARTLGEFLHRQHSAGKWVRVRPSRVPSKDDKEEDGYGFYPERSFLEREFAAIWKAQAAFYPELLTEERGDHLHRVMFFQRPLKRPKVGKCSFYPDEDRLPKAHPLFQEFRLVKELNELEVVHRGDRREKLTLEQRDTLFNQLRTQRSSAFTALRKTLKAPTGTRFNKESDARDKLKGDEVAAEMSHKDRFGQAWIGMPLAERWAVIEMLLDTEDPLEVKAWLEEHYGFAADRIDAIAAAKLPPGYGRLGETALRDMLDELKNGTVKDDSGRDVVLTERQAMDNIWKDNPALQRVVADARELPPYQEVLGRRIPPGTGKPEDPYDVQKGRLTNPTVHIGLNQLKRVVNALVRRHGRPDQIALELARELKLNEEQKAEKDREIARNTKAAQARSEKLRQLDIDDNGYNRVLLKLWEDLNLRQPENRECIYCGKAIGIGTLFSNQVDIDHILPWSKTLDDSQANRIVCHVECNRQKGNHAPAEVPQWHDRYDDILARAERLPRNKAWRFGREAMKKFKDDESFLARQLTDTQYLSRMAHEYVAALYPDEEPDEWGVFTRRNHVRVIPGRMTEMLRRQWGLNAIISDHDQKNRNDHRHHAIDAIVVGVTTRRLLQRIATAAGGREALALEETIGKIEPPWPGFYDDVKEAIDRIVVSHKPDHGSLPKPGEPARTAGQLHNDTAYGFTGEERKGVPIMVHRVPFATLTEKDIPSIRDRQLAEALYGAIAGISGKAELAAALARFSASGPYKGIRHVRVVEPVSVIAIKDRDGTPYKGYKGDANYRYDVWELPNGKWTHEVVSMFDAHRPDWQSEIRNKNPAARKVLSLHQNDMVAYEHPQDGYTIGRVVKFGSGGQMALAGNREGGALKSRDADPEDRFRYFYKSGGAMRDARLRQVRVDETGRVFDPGPQDRESRNARKQSAAG

SEQ ID NO: 829 - protein, 1287 aa, Chryseobacterium sp.
MKTVLGLDLGTNSIGWALIELDENNIPIRIVAMGSRIIPLSTSDKEEFQRGLSITKNQSRTVSRTQRKGYDRKQLKKSYLKKILNKYNIFPSDELLKLPMLDLWKLRSDSANPNENISAEQLGRILYMLNQKRGYKSARSEANADKKDTDYIQAVKGRYAQLKDRNQTIGQYFYGELNDANENNSYFRIKEEVYPREAYTEEFDTIINAQKDKHDFLTDEVIHQLRNEIIYFQRKLKSQKGLVSICEFEGFEKTVFDKEKNKDKVVFVGPKVAPKTSPLFQLCRIWEVVNTITLKIKNPEGSKYKWGEKIPDVKEKEILADYLFKNESLSFTKLLEILKLNKNNVYFNKQILKGIKGNETYSILHSILGDSELLNFDVSIIPSNHTSMLIDKKTGEILEERAGLELDTSLEKEPLNQLWHTIYSIKDLDECKSALIKRFGFDDETADKLSRIDFNKQAFGNKSNKSMRKILPFLMEGYDYSQSCSLAGYNHSNSFTKDEREQQITLDKLELLPKNSLRQPIVEKILNQMINVVNAILERYGKPSEIRVELARELKQSKDERNDTDLQNSKNKKLNEEIGKRLAELGLPLTKRYIQKYKFIFPSLSKNLKDAHVNNQCIYCGETFNLTEALSGDAFDVDHIVPKALLFDDSQTNKVLVHRKCNSTKTNQTAYDYIATKGDEQVRVYSERVDDWFKRGIISYSKMQRLKVSHKEYLERKKLGKETETDKKLWENFIDRQLRDTQYISRKSREILQKVCNNVATTEGGVTAKLRNLWGWDDVLMNLQMPKYKELGQTVVKEWTSEHGKRKHQKEEIENWTKRDDHRHHAIDALVVACTKQGFIQRINTLNSSETKDLMQQEIKEAKKLLGENYNEKEFENNNESVKNHKERLSQLDDYLRLQKPVKFDTKYVEQEADKVLVSFKSGKKVATITKFKATGKNKDTGVIVPRGALHEQNVYGKIKVIEKDKSLKYLFENSEKIVNPKIKNIVEIILSENENNSKMALSTLKKNPIFLNEEKTDLLEKASCYEYVTVRKYPLNTIKASQADDIVDERVKFLVKERLTQFGNKEKEAFKDTLWFNEEKQIPIITVRLFARPDANNLQAIKKDESGKEIGFVVMGNNHHIAIYEDKDGKLVQHSCTFWHAVERKKYNISTVIKNSSDAWNQFLDNELPEPFLNKLPADNLNLKFSLQQNEMFILGLSQEEFDKALKSNDKSLLSKHLYLVWSISENNYWFRHHLETKNSDLKKTNGVKESKRLYNIRSLGSLFSLNPIKIRLNHLGEITKIGEYS

SEQ ID NO: 830 - protein, 1466 aa, Chryseobacterium sp.
MTKNILGLDLGTNSIGWALIKQDFENKQGEILGMGSRIIPMSQDVLGEFGKGNSVSQTAARTDYRGVRRLRKRFLLRRERLHRVLNVLNFLPVHYASQIDFEKRFGKFKEDTEPKLAYNKEGFIFKNSFEEMVADFRKHQPQLLENDKKIPYDWTIYYLRKKALSKKIEKEELAWILLNFNQKRGYYQLRGEEEEENPNKLVEFYSLKITDVLADEPQKGKSDIWYSLILENGWIYRRSSKTPLFDWKEKTRDFIVTTDLNDDGSIKTDKDGNEKRSFRAPSENDWTLVKKKTEQEIDKSQKTVGTYIYETLLQNPKQKIKGKLVCTIERKFYKEELKQILEKQKEFHQELQNDDLYSDCVHELYRTNEAHQLTLSKKEIVNLFMEDLIFYQRPLRSQKTSISNCTLEFRKYKDENGVEHTQFLKAIPKSNPYYQEFRIWQWIFNLNIYKRDDDSNVTKEFLNTTEDFENLFEFLNNRKEVEQKALLKHFKLNEKLHRWNFVEDKKYPCNETKTMISTRLDKVENISKDFFTREIEQKIWHIIYSVNDKIEYEKALKSFAIKHNLDENSFFEAFKKFPPFKSEYGSFSEKAIKKLLPLMRLGKYWNEDEILKYSDDYFKNIESLLGVLKQRDENISDADRENYNKTINNKLRAELENFQNAEIESFQGLRLHIAQYILYGKHSEGDNKKFNSADDLEKFLKEFKQHSLRNPIVEQVITETLRVVKDIWTKYGNGAKDFFDEIHIELGRDMKKTRDERADATKIITENENTNLRIKALLAEMMNDVEMENVRPYSPMQQEILKIYEDGILKSDIEIEDDILKISKTAQPSSSDLKRYKLWLEQKYKSPYTGQIIPLNKLFTPEYEIEHIIPQSRYFDDSFSNKIICESAVNKLKDNYIGLGFIKQFGGTIVECGFGKNVKVFEAEEYEDFVKKHYANNRGKRNKLLLEEIPEKMIERQMNDTRHISKYISGVLSNIVRVEDGSDEGVNSKNIVPGNGKITTQLKQDWGLNDVWNELILPRFERMNQLTNSTDFTAWNENHQKFLPTVPIEFSKGFSKKRIDHRHHALDALIIACATKDHVNLLNNQSAKSDTKRYDLKKKLMKFEKVVYNHPQTGDRIEREVPKQFLKPWDNFTFEAKNNLDKIIVSFKQNLRVINKATNYYEKFVEKDGVKTKERVEQKGTNWAIRKSLHEETVSGKIDLPWVETNNGEFITATRKSLDASFNLEKIKKITDTGIQKILRNYLKAKDDNAELAFSPEGIEDLNKNIEKYNDGKSHQPIVRVRVYEKGKGRFALGQTGNNIDKYVQGSPNLFFAIYKDENGKKSYESIRLDIVIERMKQGLQAVPETNPNGISLYQNLSPLDLVYIPTEDEIESPHLIDFTILNKTRLERIYNVNDFSGYTIYFSQNSFAKNIYPKEMDMTWNEKKQKPSGSFDSKTASYNKKSIKDIFIKLKIDRLGNISKVSNTL

SEQ ID NO: 831 - protein, 1059 aa, Sphingomonas sp.
MRRLGLDIGTNSIGWCLTQGPGDEADGIVDIGVRIFSDGRDPQSGTSLAVDRRDARAARRRRDRYIGRRSAFLDTLVAHGLMPADADEAKLVAALDPYTLRARALEAPLTPHEIGRALFHLNQRRGFKSNRKAERKTNDADDGKIATAAYALDRAMLDGGFDTLGQFLNAQETKRVRMDGEAQGYDFYPQRRHVEYEFDRIWTEQAKHHPALLTETARYALHRILFYQRPLKAQVVGKCTFVHSEDRLAKAHPLFQQRRLYEEVNQLEVTTPGEANRKLTLDERDRLVRELSHKKAIAFTSLAAKIKLEPGQSFNKASETRTQLAGDEVRAVLGDKKRFGPAWEHFDRDRQWTIVERLLEEEDPDALHAFLTQDCGLDDEHAAATAKTSLPEGYGRLGATATARILAELQAEVITYDEAVRRCGWHHSDHRTGEILPQLPYYGELLTRDIPPGTQDPNDPPEKRWGRITNPTVHIGLNQVRQLVNAIVAVHGRPDQIVVELARELKLNEKDKEEHNRRIRRDTAAAIKRSEKLTQEGFPDTGANRMLLRLWEDLNPANPLDRRCPYCGAPIGMRALFAGEADVDHIIPYSRSLDDSAGNKVVAHRSCNRAKGNRTPYEKWSDDPDRWDAITAQVARLHRSKQWRFGPDAMARVEKDGGFLSRQLTDTQYLSRLAGRYLSSLYPTKEEGSVYVIPGRMTAMLRRLWGLNDILSDHNIVENKHSNAPKNRLDHRHHAIDAAVVAVSTRSLMQRIARTAGQAEDRNLDRLFEGLDPPWPGFRDQLRDRLLAVTVSHKADHGRTGTPVPGKDATAGRLHNDTAYGLTGETSAKGLPIVVHRVPLTSLKPADITDPDRIPDPVLRDAIERATAGKMGKDFTDALAKFGRSGAQETDRKGERLFRGTRRVRVREPLGVIPIADASGRVYKAYKGDSNARFDVWRLPDGKWVSDIVSMFDAHRPDQGDRRPHPAAKKVLSLRQNDMIAIERDGAPREIVRVVKFSTIGSVQLAATTEAGPLKARDASPPDVDPFRYINSSAGGLKKIKARQVRIDPLGRIFDPGPR

SEQ ID NO: 832 - protein, 1384 aa, unidentified
  REGION 1..1384: note = JGI_JBU_contig0001800012:543301590957_19
MTQVKDDYMVGLDIGTNSCGWVATDFQNNILRLHGKNAIGSHLFEEGHSAADRRMFRTTRRRIKRRRWRLNLLEEIFDPYIANVDPYFFARLKASGLSPKDSSKKYESIVFPTIEEDKSFYQKYPTVYHLRKALMNENKKFDLREIFIAIHQIIKYRGNFLQDTPISDFNASSIDVKNVLDILNEQYASLMPEYQISFSIENAKEIEKIIRDQTIFKQDKQKKISKLLPIVTKNKANSKISKDVAKQIANAILGYKTKFETLLLNEIDKNDKANWEFKLGDADADNKLELLLSSLNEAQQNIILEIKELFSAITLSEIVDEGKTLSESMVRKYEDHKHDLKLLKRVINNLSDRQKGKRLSLAYDLYVNNRHGKLLDAKKTLGKKGCLSKEDFYAEVEKNLDDSKESGLILNKINLDSFMPKQRTNENGVIPFQLHQIELDKIISNQGKYYPFLKEINPVASHRNQAPYKLDELVRFRVPYYVGPMIAPEKTKDKQKQANQSFAWMVRKEPGKITPWNFDQKVDRMASANKFIKRMTTKDTYLLGEDVLPANSLLYQKFTVLNELNNIRINGKKIPVDCKQQIFDKLFKNNSLVTTKKLITFLKENYKLVSVDIRGLADDKKFNSGLTTYNRLKHTQLFNQQIDNPKFRADLEQIIEWSTIFEDKRIYKAKLETVDWLNEKQMNILTNIRFQGWGRLSKKLLVNLHDSNGQNILEKLWDSQDNFMQIINEADFKEVITEANQSQMQSSTMEDILADAYTSPANKKAIRQVMKVVNDIKKAASSKDPKQIAIEFAREPEANPQITHVRGSRLQEIYKSLSENIVSKSIKNELDRAVKNKRLAKDKFFLYFMQLGRDAYTGKPINIDEIENGYQLDHILPQSFIKDDSLDNRVLVSSPVNNGKSDNVPIEMFGNRQAANLGMTIRQMWDNWKDLGVISKRKWNNLLLDPKHINKYQSSGFIHRQLVETSQIIKLVSTILQAEYPNTEIIVVKASSNHYLRKQLNLYKSREVNDYHHAIDAYLTAICGNLLYQVYPNLRPFFVYGKYKRFSTNPDEENEIFKHVRRFDFIARLFGKNSLNNITAGKNGPIVFKRDTIINQLHHAYEYKYMIVSTETTTRDQEMFNMTIYPRAERDIKKTRSLIPKGKGLSVAIYGGYSGNSDAYMALVKVNKAKESEYRIIGVPMRALSLLRSSNNSKETLHQILEPKVFLNKKGKRKTAVKSFEILRERVPYKQVIVDGDKKFMVGSSTYVYNAKQLTLSNNAVKTITENINDDNNATKNLDHTYDEILGVLDKYLSLFDINKFREKLHNGRNKFMALSDMEKQNTLREILKGLHDNPVTGNLKNIGLSTPLGQMQIKSGILLSPEAKLIYQSPTGLFEKRVKISNL

SEQ ID NO: 833 - protein, 1093 aa, Carnobacterium sp.
MSDLVLGLDIGISSVGWGIINEKTGEVIDAGVRLFEEATRNANEDRRNFRSSRRLKRRRKHRLERVNSLLNENGFSCASIQQVDPYMARKNALYQKVSKKDLAAALYHLAKRRGTTLDTPQEDEKTSGSELSTKEQLKKNAKKLETKHIAEVQLEKRQSGEVIRNHTNRFKTSDYVKEAIDILAKQKEYYPEITNTFIKEYISLLESRRMYYDGPGSKKSPTPYGQYFIGEDGNLHHETMINKMRGRCTYLPEELRIAKMAYTADLFNLLNDLNNLQYPDKETGEMEHLSEEDKHHFVDNFVKKGKRVTLTAIAKYLDVEDEKLIRGVRVDLKSGKAIFTDFVGYKKLLKLLKDIPTPEDFFDQIDVLDDIAEILTAEKSLTRREEQLTDLFQKTYQDDLKEVTEALINDTSFKEYHALSKKAMQIIMPELWETSKNQMQLFTEHGFGKSRMEKLQSGSNIQFDDEAILSTVAKRAHREAIKVTNAVRKKYGEMAYVVVEMAREKNSDEERKKIAEVQRNQGKFEKKICDLLEVDNLKDLRLNGKQHLALKLWDAQDGKCAYSGESIALSDIVYDFTQFEVDHIIPLSYSFDDSQQNKVLVYRDENQLKGQLTPFQYFQSGKASRSFEEFKVESLNLFKSHKISNKKLGYLLEQRDIQHDEEVQKDFINRNLVDTQYAMRSFSNSLRIFYQNHDIPTKVLSIRGSFTAALRRRTKMHKDRDAGHFHHAIDALIVAAIGRMPVFEQLKGSTFNDEGVAVDTDTGEILEAGNLFDNQSLKFISQLRHYENKVKYSHKVDRKPNRTMSNQTIYSTREKDNEKYIVGKVKNIYQLDKKGYDALKKRIDKNPDLFLMAQHDPKTWELVLKVMEEHQHADNPFQDFYKEHGYILKDGKVPVKNLKYLDRKLGIHVDITDKYADAKNDVVLLSRKSIRVDIYKNDEDKYKYLGVPYNWFKKIDGVYTLDMDLYNGKDGRNAPYKQIDDSYEFQFSLYKNDVISYDKMETLKDEVTGKKTKKMFHYEKLFRGDAMPRDNKIEIENVDLKTPKQQFLAISTLNNFYKYNTDILGNLYLLKKETFSPYLNNDSLSKKVLEKMS

SEQ ID NO: 834 - protein, 1352 aa, Lactobacillus brevis
MDKEPYGIGLDIGTSSIGWSVVDMNGRIKRVKGQTGLGVRLFEEGQAAAERRGYRTTRRRLSRRRWRLRLLREIFDEPISAIDASFFARQKASNVSPKDTKFVTTYRLFSDQSDGEFYEKYPTIYHLRQALMTEHRQFDLREIYLAIHHIVKYRGNFLRSGNPQKFQPGKLDFNERFTRINQAWLGVFDELAPQLPEEDLEDVTAIILDTTRSRLDRQRDLVKQLMKMTGNQKSWKPILTAFCKAILGLKAQVYLVLGLDVAKEDQKSLTFSLADIEDHRDDLAALMDEKQTALLEKLVDLQAAIQLTEIMPDGKGFSESMVQSYVNHKEHLCWLKEYATVQTDEQRRTKVLLAYDHYIDGNDKGKAETTGDFYNELRRLLKGDTSELAQKMMNAIELEKFMPKQRTKGNGVIPYQVHQQELDAIIENQKDYYPFLAAPNPVVEDRREQPYKLDELVHFRVPYYVGPMITAEEQAKTAAGQFAWMVRKESGDITVWNFDKKVDRVASATNFIARMKTTDTYLIGEDVLPLQSLIYQRFMVLNELNGIRVNGERLRRDQKQRLYNQVFKTRRTVSIKAIQKNLVNHGDVDKRPVIEGLADPKNFNSSLSTYQDLKAILSTAVDDPKRQVDIEKIVNWSTVFEDQRIFKDKLQEIGWLTDTQRNRLSAKRYRGWGRLSARLLTEIQDAQGQSIMDQLWQTQHTFMQIVHEPDYAAAITAINAAGFKDRTLETTIDELYTSPQNKKALRQIVAVVRDIQAARHGQVPSRIFIEAARGAMDNNPQRTRRRQKQLTDLFADRAKEIVSQTVTEELKDQIADKAKFTDRLLLYFLQNGRDMYTGEKLNIDRLSQYDIDHILPQSLIKDDSLDNRVLVQQRINRDKNDSFAADLYASKMQGTWELWRSAGLVSARKLRHLLMRADEINKYATGFVNRQLVETRQVIKLTTDVLSSLYDPEKTQLISVKAALSHQLRTELKLPKLRELNDYHHALDAYLAARIGTYLLKRYPKLERFFVYGQYKVAPQLDLRHFNFIHDLVSDKQVIDPDTGELLWDREADIKYLEHLNGLKHLLVTHEVFEDHGALFDQTIYPARKAQNKKLIPTKQGRDTAIYGGYSGQNTAYLAIVKVHDKVDYLKVMAVPIRVVSEVNQLRKLGLAAEKAYLKKLFLPQFTKKSGTIDFEVVRPHVYLQQRIEDEVYGEVHQFALRSSTYYRNLQQLWLPLSSQQVLLKKDAKDGELTRVFDQICEQAQRYFSLYERNNFRQALQNSRSQFVALPTTNVIDDHGKLVQVGKREIISRLMRGLHANAERKDLKVIGIKTSFGLLQEGNGIRLGLAAKMIMESPTGLFKREVRIDPES

SEQ ID NO: 835 - protein, 1016 aa, unidentified
  REGION 1..1016: note = JGI_MagWD_c19:4851378969_17
MAGEVSLGIDLGIGSCGWALVAEDSLVALGTRTFDVPETDKERTPTNQLRRVARGMRRVIRRRRQRMNDIRALLHRHGLLTDECKSALADRLDPWLLRAEGLDRRLSPRELALALGHIAKHRGFKSNSKRDRGANAPDESSKMLAAAAKLREKEGAWRSVAETFLNDPELQGRRRNRDGLYDRSVLREDLEREVHTLLHAQRALGNPHASETLEADFVKTAFFQKALADSEDKVGFCPLEPAEKRAARPSPSFEMFRLLARLTSLRIDGVPLSAEQIAAATHDFGHQQGITFARLRKLLALPPTARFDGTAPEDEGKRDVVARSGKAMPGSAALFKVLGEAGWDSLRKRPDILDRVAAVLTFREDVNSIRAGLAELALDAPILDVLMAGVADGAFAAFRGAGHISAKACRALIPHLAQGKVYSDACTAAGYTHSDQPETDLDSIANPVARKALGEALKQVNAIIRAHGRPAAIHVELAREVGKSAEERAEIERGIDKRNRQKDKLRQQYRDTVGGDPNAEDLLRFELWKEQGGRSLYSDRDIPPALIASGRNEVQVDHILPWSRSGDDSFINKTLCFTEENQRKKGRTPREWFDQDGLDWSAFAARVENSKEMKGRKKRNYLLKDASVLDEKFKSRNLGDTRYACRLLLNILKKTYPDITVAARPGPLTDRLRRAWGLQGLKKDAEGKRVEDDRHHALDAVVVALTSQSMLQRLTNLFQEAEARGLPTNWHGIGHLRDLLHDSGGVPRTFDALEPPWPGFRAEIIAALDGITVSRAERRRARGAGHAATIRQVSERDGEPVVFERKSIETLTEKDLERIKDAERNHRTIDALRAWIAAGKPKDAPPVSPQGHVMRKVRLSTNKKVDVPVRGGAADRGDMARVDVFRKANRKGKWEYYLVPVYPHEVATLAEPPYQAISRGDEVLDTRVGFDFLWSLYPLCWVEVVKPSGEVIEGYFRGMDRSTGAIAISPQHTKAETAKGIGVKTLASFRKFAVDRLGNRSEIQQETRTWHGKVCT

SEQ ID NO: 836 - protein, 1331 aa, Lactobacillus sanfranciscensis
MNKQPYNIGLDIGTSSVGWSATELDNRLLHIKGHNGIGVRLFKEGESAADRRGFRTTRRRLARRKWRLRLLNEIFATEIAKVDPSFFARLKQSNVSPKDPNKTMFENILFDDENLDDQKFHHDYKTIYHLRQAIINHPEQKFDIRLIYLAMHHIIKYRGHFLNQANVQDFKGGKIDLEKSFKALNDIFENQGRDLRLVTDKANQYVKVLSDNAKTRSDRKKELSKLLYVPIDKDTDKNSKKVTGEILKAILGNKAKFDVIFGIEVENPKEWVLTFNSDDFDDKIEGLSSQMTDEDSEILLILKELYFALNLSDILNNSVTDKNAKTLSEAMINRYDDHKNQLAMLKKVIDSSDKKHAKELKEAYSAYIDGENNKKISFEDLKKRIQKNLVDSELSQKINDLLDHDYFLPKQRSKENGAIPHQLQQQELDQIIESQKQYYPFLAELNPNEKRSRQAKYKLDELVAFRVPYYVGPMVEVTDSNQENNGKFAWMIRKEQGEITPWNFDEKVDRTETATKFITRMTTTDTYLIGEPVLPKNSLLYQKFVVLNELNNLKINQEIITPGQKQYLYEHVMKKNKRVTLKKIADALVIKGDYPYAPEVKGTTDQKNLNNGLTTYIDLAKIFGNELDDVDREADFEKIIEWSTIFEDQHIFALKLQELKWLTEKQRNQVVKLRYQGWGKLSKELLAGLVDDNGQRIIDLLWSDNQNFMQIVNQKSFKESIADHNGAHLEEKNLKDVINDLYTSPQNKKAIRQVILVVDDIINAVGYEPANIMMEFAREDSNDHRLTNSRSRQLENVYKDITNSWFDNDSVKDELEDKIKNKDKFTDRLYLYFTQGGKDLYTGEPLNIDDLSSYDIDHILPQSFILDNSLDNRVLTSQRNNRVSKEDQLPGELFGTKMHAFWKRLKAAHLISNKKYYNLTLTPNSISKFNNQGRFINRQLVETRQVIKLAAEILHNRYSEEKGTNIVTIKANLTHHMREKFNFYKNRNVNDYHHAFDAYLTAFVGNWLLQQYPKLKPYFVYGDFAKTEINNLKSFNMLYKFEQAHQLNEKDGKIAKDADALLGYMKNVYHFKKMLVTKKLETNHGALFKQTLYPSPAHDIKKRQLIKPKDNRPTDIYGGYTHEERKYMSLVKVIGKKDNEYRMANVPLLKINKNNDIKEILKSQFSNKKFEIVLPKVLKNQLFSENGALFVIGSKGYKYNANQLVLSDLDMKLLNDLSNNKSIDEVTINQLFKNIVDSTNKYMPLYEIKNLNEVVEKFNNLEFNDKKKTITDFLLATHANPTMSNLKNIGLPSYFGRFTSGNAGIKLSENANVIYQSPTGLFSRKVKISDF

SEQ ID NO: 837 - protein, 1147 aa, unidentified
  REGION 1..1147: note = JGI_RPDSM127_DSM127_contig_337.337:3196173780_22
MLQKSSKPYRLGLDLGSNSLGWFVTYLERRGERYEPISLGPGGVRIFPDGRNPQSKASNAVNRRMARGARKRRDRFVERRKQLMEALARHGLMPADAASRKAIATLDPYALRAKALVDALPAHHVGRALFHLNQRRGFLSNRKTDNKKNGEDGAIKQAASRLRDSMVSEKAPTLGVFFASKHLSKEYAERQDAVRAELKRTGKDHLTGNARKKAWAKARKRLFSDEVLDPAGAPDGIRARATITGTKASYDFYPTRDLLVHEFNAIWTAQAPHHPTMTEDARKEIERIIFFQRPLKDPIVGKCTLDPATQSFEDDPEGYRAPWAHPLAQRFRILSDARNLEIREVGKGSRKLTKEQSDAVALALLGSKEVKFDKLRTLLKLPDEAKFNLESDRRAALDGDATAARLSDKNGFGKVWRGLPLERQIAIVEKLLAAEIEAELVDWLERECELGPQAAARVAHTMLPEGHCRLGLRAMKAIVPIMQNELADDGVAGAGYYEAAKRAGYDHAKLPTGEQLDHLPYYGRWLADAVVGSGDARDGKERQFGQFPNPTVHIGLGQLRRLTNRLIRNYGPPAEISIEFTRALKLSEEQKAEVQREQRKNQEKNRARAAELEKLGFPANPRNLLKMRLWEELNFRDPLDRKCVYTGEQISVQRLLSDEVDIDHILPVAMTLDDSAANKIVCMRYANRHKRKQTPVEAFGSSPTFQGHRYDWNEIAARAAALPRNKRWRFDADAREQFDKRGGFLARQLNETGWLARLAKQYLGAVTDPNHIWVVPGRLTSMLRGKWGLNALLPDHNYAGVQDKAEEFLASTDDMEFSGVKNRADHRHHAIDGLVAALTDRSLLWKMANAYDEEREKFVIEPPWATMRDDLDAALKKMVVSHKPDHGVQGKLHEDSAYGLLKQPESIDDDDKDGANLVYRKPIEGLNENEIGRIRDRRLRDLVREHVETEKKKGVALADALRKLKEPSGNPHFKHGLRHVRLLKKENTDYLVPIADRTTGKPYKAYSAGENFCVEVFETADGKWDGEAIRRFDANKKNAGPKAPHRPRWHTENPGARLVMRIHKGDLIRLDHDGQVKIMVVHRLDAAAGRFKLAAHNETGNLDKRHSTDNDVDPFRWLMASYGTLKKMSAVPIRVDELGRAWRITPR

SEQ ID NO: 838 - protein, 1147 aa, unidentified
  REGION 1..1147: note = JGI_RPRCH350_RCH350_contig_254.254:455839144_11
MLERHPQRYRLGLDLGSNSLGWFVTNLQQRGDRFEPVGLGPGGVRIFPDGRDPQSKASNAVDRRMARGARKRRDRFVQRRSQLMDALVRHGLMPEEAAARKALAGLDPYQLRARALVDRLPAHHVGRALFHLNQRRGFLSNRKTDNKKNSEDGAIKQAASRLRDSMASQGAETLGEFFAGRRHSDTYAERQTAIRAELQRIGKDHLTGNARKKAWAKVRKRLFGDDVLDPAMAPEGVRARAIITGTKASYDFYPTRDLLLQEFHAIWRAQAPHHSTMTESACREIERIIFYQRPLKDPIVGKCSLDPATRPFKEDPEGYRAPWAHPLAQRFRILSEARNLEIRETGRGSRKLTKAQSDVVALALLGSKEVKFDKLRTLLKLPAESKFNLESDRRAALDGDATAARLSDKNGFGKAWRGFPLERQVAIVERLMTVEVEAELVDWLEQECGLGPEAAARVANTSLPEGHCRLGLRAIKKIVPVMQNEVGDDGVSGAGYYEAAKRIGYDHAKLPTGGDLDYLPYYGKWLADAVVGSGDARDGKERQFGQFPNPTVHIGLGQLRRLVNELIRAYGPPTEISIEFTRALRLSEDQKAQVQREQRKNQDRNRARAAELEQLGFPANPRNLLKMRLWEELNLRDPLDRKCVYTGEQISIERLLSEEVDIDHILPVAMTLDDSAANKIVCMRYANRHKRKQTPFEAFGSSPLVQGRRYAWDDIATRAAALPRNKRWRFDADAREQFDKRGGFLARQLNETGWLARLAKEYLGAVTDPNRIWVVPGRLTGLLRGKWGLNALLPDHNYAGVQDKAEAFLASTDDMEFSGVKNRADHRHHAIDGLVAALTDRSLLWKMANAYDDEREKFVVELPWPTMRDDLKAALDKMVVSHKPDHGVQGKLHEDSAYGLLDRPEPVEDDDREPANLVYRKAVETLSENEIGRIRDRRLRDLVRDHVDAAKRNGVALADALRQLTEPSDNPHFRHGLRHVRLLKKEKTDYLVPVVDRATGRPYKAYSAGENFCVEVFETADGKWSGEAVRRFDANRSNCGPKTPHVPRWRTESAGARLVMRIHKGDLIRLEHEGRTRIMVVHRLDAAAGRFKLAAHNETGNLDKRHATDNDIDPFRWLMASYGTLKKMAAVPVRVDELGRVWRIDPR

SEQ ID NO: 839 - protein, 1339 aa, unidentified
  REGION 1..1339: note = JGI_TM7x2Draft_NODEunique_6_len_24568.8:139977_3
MKQPYSIGLDIGTNSVGWAVINESFDLRKYKHQNMWGAHLFDEAQKAATRRSFRSSRRRLARRKRRITLLQRIFDNEMQKVDPHFYLRLSESMLHLGDKNSALELDANILFADHSFTDKSYREKYPTIYHLRRDLFHNSKKQDIRLVYLALHHIIKYRGNFLVEGGVDNVISSFDNQNLQKFMDFIGADESIAKKVKAILLDRSLSRSVRKSDIISLLQPSSDKKRAVSEAVGAVIGLKWNANKLFEDDSLEAKGEFSNKNYEEQRDEIAAAIGDDRYELVETLESVYQWTIFSQFIRKDSCLSDIMVEKYDAYRQDLSDLKALFHEFLPQKYKTFFHGDAAEFELYNNHKRNLDDLYKSIKKQLGEVAKDDPRYQRFEKRAELEEFLSRQRIRDNGAIPHQIHQYELEKIIDNQAQYYPFLAQNRDKIISIFTFKLPYYIGPLKTGGNFAWSVKKKDGVIYPWNFDEMIDDEASAEKFIDRMRNNCTYLPDEEVLPKNSLLYQEYEVRNELKSVTVNGERLSPDIQNRIVDELFTKELSVTYKKFIKYLYDNQIYNTDSLIISGTAKEKSFASSRKSYIDFMQKVGVSITPKNQQAIEEVIKWITLFEDKKILAKKLQKHSDIFNENQLRTILKLNYSGWGRLSRKLLDGITAHTPYGELTVIETMRSSKDNFMQIIQSNRYEFKKIIDDILSADQRTDIAYDDIKKLAGSPGIKRALWRSVRIIDEIVDTIGYEPKLISIEMARNEDEKVRTKSRYSQLEKMYKELYGKEYTKSDIKSQLADYKDKLDRKKYYLYFLQNGKCAYTGEPLDIENDLRDSEIDHISPRSLTKDDSLDNTVLVLRKENQRKLDDYPISPDIQNHMRPIWISLKNAKLMSQIKFQRLASQKQLSEDRVAGFVNRQLVETRQITKHLARMLTEKYHNSSTEVFTIRAGMSSEYRRIHDLPKCREVNDLHHAKDAYLAATLAQYIKIRYPKLDNAFIYGEYMKFKSRRQTDTDRSSFILASMNYDFTDINTGEIIWQSKTAHNVIDRTMKYNDCLTTKKTEIGDNQFYDQTIYGKDSGVTMITRKANLPVDKYGGYSGRKAAYFMAIRYLKQVRNKDVFVNEIISVPTQVYTLEKTKPGSINEYLRKNYRQVIVLVPKIPINQKIEYDGNEQFIVGSSEVTNAKQLKLPYGIEYAIAIVLKQGIPHVTISEEQAADDNKLQRKRNRQIEKRDRAISGVEKFWGIYAEKLANQYQQFGNAGNSARNTLAEYTKLSLDDKIKVIGLVLRATHAGSDRVDMKGSEKKPVFPELGLPNSFGRMAGKSLDPTKLTFVYESITGLHRRKLDGKTLGQDR

SEQ ID NO: 840 - protein, 1004 aa, unidentified
  REGION 1..1004: note = JGI_Zagb111MP_Contig_1986.13:475535210_9
MSKKVFAFDMGKASIGYCAREDNEIKEANSIIIDREHSDISSLRDRRRVKKTLDAHKAREKFFIKVWTDCGLVPLDTNSAEFKKEFSAKNDQTIYTSCLLRIVLLQNKKLEQWQIFKALYNAIQRRGYDPNLAWKSAQSEDDKENLELIQKYTQENDIELIANDDYKYPCYYDAIRLGLWCENKPDEFERTVNQQSLIKVRTTSYVAPRQLIEKELKQLWINAQKQLSELNKYSVEEFLYGEYEEAYGSYVNPDYKKYMGTEHDWQGVLGQKIPRFDNRIIAKCKLLPKRNVCKANTLENVSFVLLMKLKNLRLTMLNGRKKKLDPSEIKKIYDNWLQESNNGKILTTTITKTKIEKVLGEKISAETKTLNDDLKVNISGRSSFCKRACKIMNKFILSGELYPLDMDITEFLDPEDCPNRITEEEIRSMLSKIGDWNKLYIPDNRGENISDEELTRVKTDLMIGDITNPIVRNRLQIFRDLLLYLEKKYGKPDEVIFEFVREGADNSLFGRAKAQAAETNMKIMEKNNQLIVNELNAADAYSAVNFEKLKLLKMQAGRCVYSGDNICVEDFDKCEIDHIFPRTMGGNDALYNKVLCFRVENQDKRGRTPYEWLSSDEDKWANYVKRLNDIKGSLGKKKFELLTSKPEDCAKLIESYNGLAETSHIARVAQQITAFVFGWGLQVEGEKRHIFVNNGSSTHAIRKRYGLNSLLGNDTKKNRDNDKHHALDAICISYSRDFKYDEKSKKDIIKGFTREMVKKVIEEIIPYPYTNKKPFKGNVRPLETIYGLRTYGDKSYITQRVSLEDIEQKDKKIKSIVDEVIKNDLMEKLSQKMDSKDWVNMLQNYIHPKKKTRVKKVMIVVSEGEIEKDNNDRERIGRYCDFGTKGTKHQFKRSKGHKGQILYFNEKGAVKIMPVYANIKTQDIKDKLLALGCKLYRNGEMFYSGCLIDILNEFNVGNITYPPGTYKLRTIEEVGTTKIETNNGIELRFNIKNLVRANFKRNWS

SEQ ID NO: 841 - protein, 1330 aa, Enterococcus mundtii
MEKEYTIGLDIGTNSVGWAVLTDDYRLVARKMSIQGDSNRKKIKKNFWGARLFEEGKTAQFRRIKRTNRRRIARRRQRVLALQDIFAEEIHKKDPNFFARLEEGDRVEADKRFAKFPVFATLSEEKNYHRQYPTIYHLRHDLANSKEQADIRLVYLAIAHCLKYRGHFLFEGELDTENTSVTENYQQFLQAYQQFFPEPIGDLDDAVPILTERLSKAKRVEKVLAYYPSEKSTGNFAQFLKLMVGNQANFKKTFDLEEEMKLNFTRDCYEEDLNELLEKTSDDYAELFLKAKGVYDAILLSQILSKSDDETKAKLSANMKLRFEEHQRDLKQLKELVRRDLPKKYDDFFKNRSKNGYAGYVKGKATQEDFYKFLRTELAGLEESQSIMEKIDLEIYLLKQRTFANGVIPHQIHLVEMREIMDRQKRFYPFLKGAQGKIEKLLTFRIPYYVGPLAQEGQSPFAWIKRKSPSQITPWNFAEVVDKENSAIEFIERMTNQDTYLPKEKVLPKQSLIYQRFMIFNELTKVSYTDERGKSHYFSSEQKRKIFNELFKQHPRVTEKQLRKFLELNEQIDSTEIKGIETSFNASYSTYHDLLKLSDQMDTLLDDPDMTTMFEEIIKILTIFEDREMIREQLKPYETVLGLPAIKKLAKKHYTGWGRLSEKMIQGMREKQSRKTILDYLIDDDDFPCNRNRNFMQLINDDHLSFKETIANELIMSDSNVLLDQVKAIPGSPAVKKGIWQSIKIVEEIIGIIGKAPKNIVIEMARENQRTSRSRPRLKALEEALKNIDSPLLKDYPTDNQALQKDRLYLYYLQNGKDMYTGEPLEIHRLSEYDIDHIIPRSFIVDNSLDNKVLVSSKVNRGKLDNAPDPLVVKRMRSHWEKLHQAKLISDKKLANLTKQNLTEADKARFIQRQLVETRQITKHVANLLHQHFNLPEEVSATEKTSIITLKSTLTSQFRQMFDIYKVREINHHHHAHDAYLNGVVAMTLLKKYPKLAPEFVYGSYIKGDINQINKATAKKEFYSNIMKFFESEEIICDEQGEVIWNKKRDLSTIKKTIGAHQVNIVKKVEKQKGGFYKETINSKANPEKLIPRKASLDPLKYGGYGSPLVAYTVIFIFEKGKQKKVTKGIEGITVMEQLRFEQDPREFLKTKGYEGVKQWLILPKYILFEAQGGYRRMIASHQETQKANSLILPENLVTLLYHARHYDEINHKVSFDYVNAHKEGFNDIFDFISDFGVRYILAPQHLEKIKVAYEKNKEVDLKEMIDAILSLLKFTLFGASVEFKFFDIKILKRYKSLTDIWEATIIYQSVTGLYERRVEVRKLWDGERL

SEQ ID NO: 842 - protein, 1150 aa, Enterococcus faecalis
MYSIGLDLGISSVGWSVIDERTGNVIDLGVRLFSAKNSEKNLERRTNRGGRRLIRRKTNRLKDAKKILAAVGFYEDKSLKNSCPYQLRVKGLTEPLSKGEIYKVTLHILKKRGISYLDEDDTEAAKESQDYKEQVRENAQLLTKYTPGQIQLQRLKENNRVKTGINAQGNYQLNVFKVSAYANELATILKTQQAFYPNELTDDWIALFVQPGIAEEAGLIYRKRPYYHGPGNEANNSPYGRWSDFKKTGQPATNIFDKLIGKDFQGELRASGLSLSAQQYNLLNDLTNLKIDGEIPLSLEQKEYILAELMTKEFTRFGVNDVVKLLGVKKERLSGWRLDKKGKPEIHTLKAYRNWRKIFAEAGIDLATLPTETIDCLAKVLTLNTEREGIENTLAFELPKLAEPVKSLVLDHYKELSQSISTQAWHRFSLKTLHLLIPELMNATSEQNTLLEQFQLKSGVRTRYSEYNKLPTKDVLAEIYNPTVNKTVSQAFKVMDALLEKYGKEQIRYITIEMPRDDNEEDEKKRIKELHAKNSQRKNDSQSYFMQKSGWSQEKFQTTIQKNRRFLAKLLYYYEQDGICAYTGLSISPELLVSDSTEIDHIIPISISLDDSINNKVLVLSKANQVKGQQTPYDAWMDGSFKKTNGKFSNWDDYQKWVESRHFSHKKENNLLETRNIFDSEQVEKFLARNLNDTRYASRLVLNTLQSFFANQGTKVRVVNGSFTHTLRKKWGADLDKTRETHHHHAVDATLCAVTPFVKVSRYHYAVKEETGEKVMREIDFETGEIVDEMSYQEFKKSKKYERKTYQVKWPNFREQLKPVNLHPRIKFSHQVDRKANRKLSDATIYSVREKTEVKTLKSGKQKITTDEYTIGKIKDIYTVDGWEAFKKKQDKLLMKDLDEKTYERLLSIAETTPDFQEVEEKNGKVKRVKRSPFAVYCEENDIPAIRKYAKKNNGPLIRSLKYYDGKLNKHINITKDSQGRPVEKTKNGRKVTLQSLKPYRYDIYQDLETKAYYTVQLYYSDLRFVEGKYGITEKEYMKKVAEQTKGQVVRFCFSLQKNDGLEIEWKDSQRYDVRFYNFQSANSINFKGLEQEMMPAENQFKQKPYNNGAINLNIAKYGKEGKKLRKFNTDILGKKHYLYYEKEPKNIIK

SEQ ID NO: 843 - protein, 1464 aa, unidentified
  REGION 1..1464: note = Locus24
MAKILGLDLGTNSIGWAIVDKDGNDFSLVDKGVRIFSEGVKSEKGIESSRAAERTGYRSARKIKYRRKLRKYETLKVLSSNGMCPLSVEEVEDWKKSGFKKYPLNPEFLKWLRTDEYQHINPYYFRDRASKQKVALFELGRALYHIAQRRGFLSNRLDQSAEGVFEEHNPQIQSLIEDLDDSKLILDELKNYYVDKGIIEEAEKGVFKKDLDEGEKKLKSLYNSLVGIIKKNENNVEKCKEEFIARLNKKEDLGKVKGKIKDISQAMLDGNFKTLGQYFFSLYNKGKIRNQYTSREEHYLEEFITICKIQGIEGIDDKEKLPEKKFTGLAKDLYKAIFFQRPLKSQKGLIGKCSFEKSKSRCAVSHPDFEEYRMWTYLNTIKIGTQSEKTLRFLTQDEKLKLVPKFYRKNDFNFEVLAKELVEKGASFGFYKSSKKNDFFYWFNYKPTDSVAACQVSASLKNVIGEDWKTKIFTYKTLNAKEEEVTKSVDYKDLWHLLSVATSDIYLEEYAKDKLGFDDKNAKAFSKIKLKKDFASLSSSAITKILPYVKEGLLYSHAVFMANIENIVDENIWNNLDQRNYIQSKIAEIIEGYTFEKTGLEVVNSLIKEYKTENDYSKKVYYSKEAEPEFEKDLKQKLVVFYKSNDIEDENIKQAIFNDLYSVLIDQLKKYEYIKIQRLDEKVLEFLKGENEDGEVFCNNPKQLKKLYHPSDIEIFKKQKVKDKDGKETGQLILGSPLTSSIKNPMAMRALHQLRKVLNTLILEGQVDESTRIHIEMARELNDANRRKGIQDYQKENKDFRDNAIKEIKKLYLDECGKEVEPTEDDILRYQLWIEQDKCEIYEQGKNISICDIIGSNPAYDIEHTIPRSISQDNSQMNKTLCSQRFNRDVKKQKMPIELSNHLEILPRIAHWKEEADNLSREIEIISRSIKAASTKEIKDKKIRRRHYLTLKRDYLQGKYDRFIWKEPKVGFKNSQIPDTGIITKYAQAYLKSYFKRVESVKGGMVAEFRKQWGIQESFIDENGFKQYKEKDRSKHTHHTIDAITIACMTKDKYDVLAKAWTSEDEQDKLKAKALMADAKPWKTFKEDLLKIEDEILVSHYTPDNVKKQSKKIIRVRGKKQFIAEIERDVKGKAIQKKDANGKVVYKLNDKGEKIPRLQQGDTIRGSLHQDSIYGAIKNPLNTDEIRYVIRKDLESLKASDIENIVDETVKEKVKQAVTNKVLLLSSNAQQKNKIAENEKVWMNKEKQISINKVRIYANSVKNPLEIKEHSLLSKSRHEHKQRVYGQNDENYAMALYELDGKREFELINNFNLAKLIKNGQGFYPLNKEKELKGKKVLYPIAKSNSRDVVLKRGQQVVFFDKEVEKPKDISEILDFKRRVYIIEGLSIQRIKSGNNEFEYGVIMLRYFKEARKSDEIKKDNFKPDGVFKLGENKPTRKMNHSQFTAFVEGIDFKVLPSGKFVKI

SEQ ID NO: 844 - protein, 1458 aa, unidentified
  REGION 1..1458: note = Locus 25
MAKILGLDLGTNSIGWAIVDKDENNFSLVDKGVRIFSEGVKSEKGIESSRAAERTGFRSARKIKYRRKLRKYETLKVLSSNGMCPLSIEEVEDWKKSGFKQYPLNPEFLKWLRTDEAENINPYFFRDKASKQKVPLFELGRAFYHIAQRRGFLSNRLDQSAEGILEEHCPKIETIVEDLNSYEEVLENLKDYFFFETGILDANEKSGYAKDLDEGDKKLVSLYKSLHTIVKKNDTNFEKGKAEIIERLNKKDVLGKVKGKIKDISQAMVDGSFKTLGQYFFSLYSKEKIRNQYTSREEHYLEEFITICKVQGIDSINEKEQLPEKKSDGLAKDLYKAIFFQRPLKSQKGLIGKCSFEKSKSRCSVSHPDFEEYRMWNYINTIKIGTQSEKTLRFLTQEEKLKLVPKFYRKNDFNFEVLAKELIEKGTSFGFYKSSKKNDYFYWFNFKPTDSVSACQVSASLKNIIGEDWKTKTFTYQTLNVKKEEVTKTVDYKDLWHLLSVATSDIYLNKYAKDKLGFEDKNAKAFSKIKLKKDFGNLSLSAITKILPYIKEGLLYSHAVFMANIENIVDEEIWKDEHQRKYIQTQIAEIVENYTFEKSQLEVINGLIKDSKLKEEYYSKEAESIYKKDLATKLVLFFKYNVIENESDQKIIFENLFPIFIEQLKKYEFIKIQRLDEKVLEFLKGENQDGEIFCSNPKQLKKLYHPSDIEVFKKKIIKDEFGNEKVVLGTPLTSAIKNPMAMRALHQLRKVLNTLILEGLVDENTLIHIEMARELNDANKRKGIQDYQNENKKFREDAIKEIKKLYLDECKKEVEPTEDDILRYQLWIEQNRQEIYEQGKNISICDIIGSNPAYDIEHTIPRSRSQDNSQMNKTLCSQRFNREIKGNKMPIELNNHLEILPRIAHWKEEASNLSREIEIISRSIKAAATKEVKDKKIRRRHYLTLKRDYLQGKYDRFILEEPRVGFKNSQIPDTGIITKYSQAYLKSYFKRVESVKGGMVAEFRKQWGIQESFIDENGFKHYKIKDRSKHTHHTIDAITIACMTKDKYDVLAHAWALEDEQNKKEAKAIIEKAKPWKTFKEDLLKIEEEILVSHYTPDNVKKQSKKVIRIRGKKQHVAEIERDEKGKAIPKKDANGKILYKLDKEGKKLPRYQQGDAIRGSLHQDSIYGAIKNPLNTEEIRYVIRKDLESLKASDIENIVDETVKEKIKEAVANKVLLFSSNAQQKNKIRENEKVWMNEEKQVPINKVRIYANSVKNPLEVKEHSLLSKSRHEHKQKVYGQNDENYCMAIYELEGKREFELINNFNLAKLIKGGQGFYPFYKEKEVKGKVVQVPIAKRNGRDLILKRGQQVIFYDKDVENPDDVFDLVDLKGRIYIIEGLSIQRQVVSGKLYEFGSIMFRYFKEARKADEIKKDSFKPDGTFKSGEIKPTRKMNHNQFTAFVEGIDFKVLPSGKFIKI

SEQ ID NO: 845 - protein, 1127 aa, unidentified
  REGION 1..1127: note = Locus 26
MAKILGLDLGTNSIGWALIDDKLNKILGIGSRIFPMGVENLGDGDNEMSKNASRTGARGVRRQFFRRRLRKKVLLKSLSENNMCPINTKDFEDWKQTKQFPNEKLATWFAMNPYELRQKALTEKLSLEEIGRIFYHLIQRRGFLSNSRKGGSDDGAIFKGNAKEGKIGIDYTLESIEGKTLGSYLYEIYPKENQPFQYGLERIRNRYTTRRMYIDEFEMIWNKQSEFHSVLNYDLKTILGGRKQDNYTEDGILFYQRPLRSQKHLVGNCSFEPLKTKCPISAIPVEMFRIWQWVNTVEYNGKKISEEEKTKLVEQLLSFDKIEFKKLRKAIGKESAEFKFNYKDDDKIAGTHTISNLSNRKFFGKRWFDFSDKEQEDIWHVLYFFDSKSNLKEYAVKNWNFSEEQAIAISRFNVKDGYASLSRKAIGNILPFLQQGYTYDIAVVMGGIKNAFGDKWQNDTVENKLKQLDLIDNIEGIVRSKISGGFIDTIKDLLRKEFEFNDKQLKKLYHHSAAIDTVALLRKLPTGKQADKDIQAIRNPIVITALFELRKLVNELIEEHGQLDEIKVEMARDLKISKSQRNKIRKDQKRLERENDRVKKEVEKYVRVSHDNILRFKLWEECKQTCPYTGVVIPVTKLFTGEIQIEHIHPWSRSLNDSFNNKTLCYADENRRKGDKTPFEFYGSDELDWIARKERALKLFSDTKEYPNAYQKFKRFVQQKFDDDFSSRQLNDTRFISKEASSYLKQICEKVNVSPGQMTANLRQKWGLNTVLNDENAKTREDHRHHAIDALVMACGKTSYLQELSKWNRYNRNYDLKDFPMPWETFRFDAEKAIDKILISHKRISNDITTRYTKVEKNGKTYINKGVAARGQLHKETVFGKRNFNGDEAFHVRKSIDSLTTEKQLEKVVDEVIKKLIHKKIKELGGFVKGTIPANTFFNVDENGVKQPQIFLPNKNGSPVPILKVRMKENISGAEKLKDNVNQWVNPRNNHHVLIYKDEKGILREEVVTFWTVVERKSKGFPVYQLPVEGKEIVTALHINDMFLLGLNEEEINWENPDYEILRDSLYRVQSLSSKYYEFRQSINAESQNKISPIYEQIRGFGSGKTGWDSFNPIKVKISVSGKISKI

SEQ ID NO: 846 - protein, 1108 aa, unidentified
  REGION 1..1108: note = Locus 27
MAYKLGIDLGTASIGAVAIRIENNEPQSIDWHAVRIYSEPVVNTPKGLQPKKAARRDARQLRKQIERRARRLRRIANLIPLLGLHKAEVKPGRRQDLTTLRAIAARQQVELNEFALVLLRLAKRRGYAGGFRDSKDGVVKSSSDKLSEEMRRLAETQNLQEITLGEYLLYRQEHGLPVWLKAERPGLEPRYALREMVTAEFEQLWTTQARYHPILASNHLGKPLKQWFNEALFYQRPLKSPAHMVGNCLLEPNLPRAPRAHMAAQHFRIDKTLHDMRWGSGRRAERLSKAQLNVLRQMLNDPANADGKVSFKHLYQALSETGLSDPRSRTLNLERSSCDQLSGNNTVARWRALGLYDQWLTLAPRDQTTIINLLADLGGPELLVPDDWHQNIRKSSAKAGDTNLYRRFRPEVVDFINALRECKDNNGQPVFNRLTSMKFEGGRSSYSVKALEKLNTWFNDPWWPDEGSGAERGDEIDEDAALRVCYPHLFTQPQELLQRLEAAPTTGNDVVDGALRELRKVINQCIDALGERPEEIVVEMAREIGKGVVWRKEQENRIRQNELARRKIASELEKHGLSANNTRILRYQLWEEQDLHWCPYCAHPINLEAATSGMTHIEHVLPRSLTQIGRKRSELVLAHAGCNNLKADQTPWQAFGHDVERWSAVERAAARFQELGKKSYAKDRIKAMGFYRKAELLLLKDYESEVLSDESIADFADRQLHQTSWIAKAAAQWLRTITPLVSVSRGEFTALLRHQWRLDTVIAEARLDEKLPVLDIDACPVSPEAFQQFRKQWEGHPPDNLAERTERKLEKRLDHRHHGIDALVIALTSRSLYMSLARRYVEESERRARGERVRHDWSIEPTMHNLRNQALGMVRTCNLTHKPDRNPAGRLFKDTAYGVHFPEEGDRVQLTLRKPLTSLADEKSAEKTRKNLHSIASSEVRLLVLKAFEARLSVGQNPKQALSEPVPYPAYGTAIWRVRCMQGYADDAVRIVHKSRQGEHEKHLLNDGYACLEITAGENGKHQVRLVTQREAQGRGFMDNRQQAKRIFKGDTVIDRRDDRKYLVGYFKAEGYIFLLPHTDTRNFDKIKEADSGKKKVSFNQAYQLERI

SEQ ID NO: 847 - protein, 1108 aa, unidentified
  REGION 1..1108: note = Locus 28
MAYKLGIDLGTASIGAVAIRIENKVPISVDWHAVRIFSEPVVNTQKGLTPKKTARREARQLRKQVERRARRLRRIANLIPLLGLQKAEVKLGRRQDLTTLRAIAAREKVELHEFALVLLRIAKRRGYAGGFRDSEGGVVKTASDKLSVEMRALAETRGLQQITLGEYLLHRQQRGLPIWLKAERPGLEPLYALREMVTAEFEQIWTIQAKCHPILNSCHLEKPLKQWFYQALFYQRPLKSPAHMVGNCLLEPNLPRAPRAQMAAQRFRIEKTLHDLRWGGGRQAERLNTAQLDLLRQTLSDPTNVDSKVSFKRLYQALNEAGLNDPRNRTLNLERSSRDQLLGNSTVARWRALGLQDQWLMLAPRDQTSVINLLADLGGPEILTPDDWHQNIRKSSAKDDNTKAYRRFRQEVIDFIDALRRCIDSNGQPVFNRLSAMKFDGGRSSYSVKALEKMNEWFNNPWWPNEGPGSERRGEIDEEVAIRVCYPHLYTQSQELHPRLEAAPTTGNDVVDGALRELRKVINQCIDEQGEKPQEIIIELAREVGKGVALRNEQESRIRNNELARRKIASELEGHGLIASSTRILRYQLWEEQERHWCPYCALPISLEAAISNMTHIEHVLPRSLTQVGRKRSELVLAHAGCNHLKADQTPWQAFGHDAERWSAVERAAARFQELGKKCYFKDRAKAMGCFRKSALLMLKDYESEVLNDESIAGFANRQLHQTSWIAKVAAQWLRTISPLISVSRGEFTALLRHQWRLDTVIAETRYGEKLPVLDIDGNPVHPEEFQHFRKQWEGHPPDNPAERTERKLEKRFDHRHHGIDALVIALTSRSLYMSLARRYVEESKKRARGEKVRRDWSIEPPMHNLRGQALDMIRACNLTLKPDRNAAGRLFEDYAYGVHFSDASERAQLTRRKTLIDLADEKSAEKTRKNLQSIASPEVRQIVVEALQMRLSAGQNPKQALSKPVLYPAYGTEIWRVRCLQGYADHAVRIVHNSRQGEHEKCLLNDGYACLEIRAGENGKHQARLVTQREAQGRDFMETQQQAKRLFKGDTVIDRRDDRKYRVGYFTAEGNIFLIPFEDTRNFDKINERNSGKKKVSFNQAHRLERV

SEQ ID NO: 848 - protein, 1081 aa, unidentified
  REGION 1..1081: note = Locus 9
MKYVLGLDIGIASCGWAVINQEKHRIEDLGVRIFDKAEHPKDGKSLAAPRRESRSTRKTLRRKKHRMQRIKVLLVKYGLLSTTEIENLYESASEIDVWNLRLDALERKLNQKEFARVLIHLAKRRGFKSNMKETILSENGQILESISENQKIMEQQNYRTVGEMIVKDNKFENHKRNKDGTYIGTVTRQQLQDEIHMIFNAQRLFINDLATEEFESSYLEIWASQRPYASKDQIEKMIGYCTLEPKEKRVPKASWSFQYFVALQTINNLRLISKDRIEELSFEEKKQIMNLALEKPIVKYIDIRKLLSISNELHFNNLLYSADTVDTTVENKKCIELKEYHSINKVYKQIYGKNALNLLPIDYDTIAYGLTIFKDDKDILEYLQNKYINTKGKTISNLTKKTYDDTFIQALLTLNFTKMGHLSFKALKNIIPFLEEGMSYDKACDKAGYNFKGTSFTKKTKYLPVIPQNTNPVVHRALSQTRKVINAIINKYGSPVSIHIETARELSKTFQERKEIDSMYQDNSKKNEHAINKLKELGNINPSGINIVKFKLWKEQDGRCMYSGEYIEPHRLFEEGYTEVDHILPYSRSLDDSYNNKTLALGIENQRKGNKTPYEYMGNTSIWYKFETRVQSNKKINKKKQQKLLLQYFSHAREQEFIERNLNDTRYATIYISAFIQQHLIFSESFSKKRVHTVSGIITSHVRSRWGFNKDRKESHIHHALDAVIVAVTSDQMIQRVTNYYKLKELNRKLQAKGILFPEPWEGFRLELEARISPNTQQYLKGICSKNYADINLSEIKPIFVSRMPKRSITGELHQETIRKFIGYNEKGKVLTAIKTKLEDIPFDANGDFPMYGKETDLYTYNAIKERYLSHKKDKRKSFQESLYKPTKTGEIGPLIKSIKIIDTRTIVNPVNQGKGVVYNSKIARTDVFKKDDKYYLIPIYTIDLMKNVLPQKAITAGKGYEDWITIDHSFTFLFSLFPNDLIKIVPSKNKEIKARSTSSKKEILLPSLTGYFKKVHSGTAGITVESHDGRFIADIGSKQLLLFEKHQVDVLGHYTKIKEEKRIGMSTCNDNKKSSAFGSL

SEQ ID NO: 849 - protein, 1072 aa, Actinobacillus minor
MVKIATSVIFAKKDIQMKALNYILGLDLGIASVGWAVVEIDQNELPIRLIDLGVRTFERAEVPKTGDSLALARRLARSSRRLVRRRAVRLLKAKRLLKQEGILQADDFHSSHLKPLPNNPWELRVKGLNHLLDRKEWAAVLLHLLKHRGYLSQRKNESKTDNKELGALLKGVSENRQLLQAQAFSTPAEIAIKKFQQEEGHIRNQRGAYSHTFDRNDLLAELRLLFQKQREFNNPYTSQSLEQAIAELLMWQKPALSGEAILKMLGKCTFEPSEYKAPKNSYSAEYFVWLTKLNNLRILENGADRGLTAEERQLLINQPFEKAKFTYAQARKLLELSDLAIFKGVRYGKDNAESATLMEMKAWHAIRKALESNGLKTEWNGLKTKPELLDKIGTAFSIYKTDEDISQYLNGELSPAVLNALLENLSFDKFIRLSLQSLAKILPLMEQGLRYDEACKQVYGDHYGKKEQLELRFLPKIPVEDIRNPVVLRTLSQARKVINGVVRLYGSPARIHIETGREVGKSFSERRDISKRQEENRNERQRAVEKFKEFFPHFVGEPKAKDILKMRLYEQQHGKCLYSGKELDLNRLLEKGYVEIDHALPFSRTWDDSFNNKVLVLASENQNKGNQTPYEWLNGKENAERWKLFQALVNGSRFPYSKKQRILTKYLDEDGFRERNLNDTRYVARFLCNFIEDNMQLVGQGKKRVFASNGQITALLRRSWGIQKVREDNDRHHAVDAVVVACSTRALQKKITDYVRYKEMNVFTGEKIDQETGEIIKFHFPEPWKFFRQEVEIRVFSETPAEDVVIALPDRPQANHEFIQPLFVSRAPTRKMTGQGHMETIKSAKRLAEGLSVSRVPLTQLKLKDLENMVNREREKALYEALKVRLEKFNNDPAKAFADPFYKKGGQQVKAVRVEQVQKSGVLVRQENGVADNASMVRVDVFIKGGKYFLVPIYTWQVAKGILPNRAATQGKEEEYWDIMDETAIFQFSLYQNDLIKLVTKKKTIFGYFNGLNRATSNINIKEHDLDKSKGKDGIYLEVGVKLALSLEKYQVDELGKNIQPCRSMKKRPPVR

SEQ ID NO: 850 - protein, 1082 aa, unidentified
  source 1..1082: note = Methylosinus
MRVLGLDAGIASLGWALIEIEESNRGELSQGTIIGAGTWMFDAPEEKTQAGAKLKSEQRRTFRGQRRVVRRRRQRMNEVRRILHSHGLLPSSDRDALKQPGLDPWRIRAEALDRLLGPVELAVALGHIARHRGFKSNSKGAKTNDPADDTSKMKRAVNETREKLARFGSAAKMLVEDESFVLRQTPTKNGASEIVRRFRNREGDYSRSLLRDDLAAEMRALFTAQARFQSAIATADLQTAFTKAAFFQRPLQDSEKLVGPCPFEVDEKRAPKRGYSFELFRFLSRLNHVTLRDGKQERTLTRDELALAAADFGAAAKVSFTALRKKLKLPETTVFVGVKADEESKLDVVARSGKAAEGTARLRSVIVDALGELAWGALLCSPEKLDKIAEVISFRSDIGRISEGLAQAGCNAPLVDALTAAASDGRFDPFTGAGHISSKAARNILSGLRQGMTYDKACCAADYDHTASRERGAFDVGGHGREALKRILQEERISRELVGSPTARKALIESIKQVKAIVERYGVPDRIHVELARDVGKSIEEREEITRGIEKRNRQKDKLRGLFEKEVGRPPQDGARGKEELLRFELWSEQMGRCLYTDDYISPSQLVATDDAVQVDHILPWSRFADDSYANKTLCMAKANQDKKGRTPYEWFKAEKTDTEWDAFIVRVEALADMKGFKKRNYKLRNAEEAAAKFRNRNLNDTRWACRLLAEALKQLYPKGEKDKDGKERRRVFSRPGALTDRLRRAWGLQWMKKSTKGDRIPDDRHHALDAIVIAATTESLLQRATREVQEIEDKGLHYDLVKNVTPPWPGFREQAVEAVEKVFVARAERRRARGKAHDATIRHIAVREGEQRVYERRKVAELKLADLDRVKDAERNARLIEKLRNWIEAGSPKDDPPLSPKGDPIFKVRLVTKSKVNIALDTGNPKRPGTVDRGEMARVDVFRKASKKGKYEYYLVPIYPHDIATMKTPPIRAVQAYKPEDEWPEMDSSYEFCWSLVPMTYLQVISSKGEIFEGYYRGMNRSVGAIQLSAHSNSSDVVQGIGARTLTEFKKFNVDRFGRKHEVERELRTWRGETWRGKAYI

SEQ ID NO: 851 - protein, 1119 aa, Lactobacillus coryniformis
MGYRIGLDVGITSTGYAVLKTDKNGLPYKILTLDSVIYPRAENPQTGASLAEPRRIKRGLRRRTRRTKFRKQRTQQLFIHSGLLSKPEIEQILATPQAKYSVYELRVAGLDRRLTNSELFRVLYFFIGHRGFKSNRKAELNPENEADKKQMGQLLNSIEEIRKAIAEKGYRTVGELYLKDPKYNDHKRNKGYIDGYLSTPNRQMLVDEIKQILDKQRELGNEKLTDEFYATYLLGDENRAGIFQAQRDFDEGPGAGPYAGDQIKKMVGKDIFEPTEDRAAKATYTFQYFNLLQKMTSLNYQNTTGDTWHTLNGLDRQAIIDAVFAKAEKPTKTYKPTDFGELRKLLKLPDDARFNLVNYGSLQTQKEIETVEKKTRFVDFKAYHDLVKVLPEEMWQSRQLLDHIGTALTLYSSDKRRRRYFAEELNLPAELIEKLLPLNFSKFGHLSIKSMQNIIPYLEMGQVYSEATTNTGYDFRKKQISKDTIREEITNPVVRRAVTKTIKIVEQIIRRYGKPDGINIELARELGRNFKERGDIQKRQDKNRQTNDKIAAELTELGIPVNGQNIIRYKLHKEQNGVDPYTGDQIPFERAFSEGYEVDHIIPYSISWDDSYTNKVLTSAKCNREKGNRIPMVYLANNEQRLNALTNIADNIIRNSRKRQKLLKQKLSDEELKDWKQRNINDTRFITRVLYNYFRQAIEFNPELEKKQRVLPLNGEVTSKIRSRWGFLKVREDGDLHHAIDATVIAAITPKFIQQVTKYSQHQEVKNNQALWHDAEIKDAEYAAEAQRMDADLFNKIFNGFPLPWPEFLDELLARISDNPVEMMKSRSWNTYTPIEIAKLKPVFVVRLANHKISGPAHLDTIRSAKLFDEKGIVLSRVSITKLKINKKGQVATGDGIYDPENSNNGDKVVYSAIRQALEAHNGSGELAFPDGYLEYVDHGTKKLVRKVRVAKKVSLPVRLKNKAAADNGSMVRIDVFNTGKKFVFVPIYIKDTVEQVLPNKAIARGKSLWYQITESDQFCFSLYPGDMVHIESKTGIKPKYSNKENNTSVVPIKNFYGYFDGADIATASILVRAHDSSYTARSIGIAGLLKFEKYQVDYFGRYHKVHEKKRQLFVKRDE

SEQ ID NO: 852 - protein, 1148 aa, Verminephrobacter aporrectodeae
MWSARTTWRCSKSRSNCRTRCVEVLWCRGGIWSCPVERRQGLWGIAETGGRLGSKKTKTPPAGSSIWCIFLRVSVQSAYPSEVIGCEYSTIRRYDSIYQGVQMDEASVYRLALDLGSSSLGWAVLRLDRSGAPTAIIKAGSRIFSDGRNPKDGSSLAVTRRAARIMRRRRDRLLKRKARMHDQLMRHGFFPADAAGRKVLERLNPYQLRAKGLHQALTPGEFARALFHINQRRGFQSNRKTDRKDNESGALKQAISELRAQIHDSGCATVGEWFWKERMQQKPEGVHRQGVRARYRETPYTTDEGRQRIDKRYDLYVDRAMIEQEFDALWAVQAALQPGLFTDAACKELRYTLLFQRKLRPVKPGRCTLLPEEERAPLALPSTQRFRILQEVNHLRLLDEALREVPLTLAQRDALVAALESQGKLGFAPMRKLLKLPGTVKFNLEDEKRTELKGNATSAILARKDLFGPAWAGFDAALQDEIVWQLVSEEGEGRLIAWLQQHTGVDEARAEAIADTSLPEGYGSLSRKALERIVPALQREVCSYDKAVQAAGFAHHSDLGFDFEHSGDEVQQVGERIIASTGEVRPLFAFKQLPYYGKALQRHVAFGSGKPEDPEEKRHGKIANPTVHIGLNQVRTVVNALIRRYGRPSEVVVELARDLKQSREQQQETQRKQAENQRRNTRIRERIAETLGISPERVRSSDIQKWILWEELSFDVVDRRCPYSGEQISTTMLLSPKVEIEHILPFSQTLDDSLNNRTVALREANRIKRNRTPWDARADFEARGWSYEGILHRAERMPLRKRYRFAPDGYQRWLGEDKDFLARALNDTRYLSRVAANYLRLVCPKPQGVRVIPGRMTAMLRAKFGLNDVLGLDGEKNRNDHRHHAVDACVIGVTDQGLMQRFARASAQAREDGLTRLVQDMPLPWPSYRDHVERAVRHIWVSHKPDHGFEGAMMEETAYGIRKDGSIKPRRKADGSAGREVVNLIRITESRQPVRHGVDSQGQPLPYKGYVGGSNYCIEITANDQGKWEGAVISTFEAYRIVRASGWGRLRHCSHGQNGRPLMMRLMIGDAVRLALDGSEKTMRVVKISANGQVFLVAPNEANVDARNRDKADPFAYVSKKAGSFQSAKARQVSISPIGELRDPGFKG

SEQ ID NO: 853 - protein, 1552 aa, Thermophagus xiamenensis
MFSQRNNPYCELLQNVKQLYKEKFGKTNQVDNSIIYGFMKRILGLDLGTNSIGWALVENDENDRKGKIIGMGSRIIPMDMSELDNFNKGASISKTAERTRLRMTRRLRERHLLRRARLHRILNIMGFLPEHYRNSIDFIDKKGCFFEGQEPKIAYKPDKNSEQFCFLFTSSFHEMLEDFRKFQPELIQNRKKVPYDWTIYYLRKKALTQKISKEELAWIILNFNTKRGYYHLRGEDEDNQDNKKIKEFRALKVVNVTEREGANSSGKKWYDMELENGWVYSRQSNLPPNLEGKTIELIVSYTLDNNGNIKKDKNGKEKYSLSMPGEEDWNLVKIKTENDLKTSKKSVGEYIYDHLLKNPDQKIRGKLISTIERKFYKEELSRILKTQMNFYEELKNRELYQKCVEELYPNNKSHQQTLLQKDFIHLIVEDIIFYQRPLKSKRAFVNNCPLEYRVYVDKKSGELIKSGVKCIPKSHPLFQEFRLWQYVRNLRIYERERMVNGRLMVNVDVTNELLPDEEHIVRLFDLLNDRKSFKQDDVLRFVGIKSPKDRKRYSWNYPEDKELPGNETRHLILAWLKKVDGVPEDWLDPEKLKALWHLLYSVTDREEIIKGLHSFAKKYELPDTFVEHFKKIPRLEREYGSFSEKAIKKLLPLMRMGKYWKAEEIPADLLEKAQKIIDAEADDRISDEVREKLLHLKDISQLKGLPLWQASYLVYGRHSETGEVVKWRTSEDLEKYILQFKQHSLRNPVVEQVILEALRVVKDIWEHYGEGKEGFFNEIHVEIGRELKNPADKRKKITSQIQENENTNLRIKALLEELFNDPSVKNVRPYSPAQQEILRIYEDGVLNGQKEIPDDILKISKMARPSKSQLVKYKLWLEQKYRSPYTGEIIPLSQLFTSAYEIEHIIPQARYFDDSFSNKVICEAEVNREKGHQLAFEFITKRGGDEIELNFGKKVTILNVEEYQKFVKDHYGRSLRSLSKMRKLLMEDIPDDFIDRQLNDSRYISKVVRNLLSNIVRAEDENSLVSKHLITCTGGVTTRLKHEWGLNDVWNELITPRFVRLNKMGKEKFGEWINKKGKQVFQIQMPLELQKGFNKKRIDHRHHALDALVVACASRSHVNYLNNDSARANASETRYDLRNKLCYKDKTDSNGNYRWKFYKPWESFTEEAKNRLAGTVVSFKSNRRIMTRSSNRYFKWVDTSEGKKKKLVRQIKGDNQAIRKPLHKDTVLGKVSLRKEKKVSLSKAIDLWESIVDKPLKKRIQSLREQGYDKKLLLKYFKDRNNQFNGQDISRVNIYFFDNNLAARRVTLDASFNSEKRIDGITDSGIKKILYAHLQNEKYHGKKDEKGNEISPYELAFSPEGLEEMNANIKKLNGGKPHCPIYKVRLAETIGEKFKLGEKGNKNKKYVEAAKGTNLFFAVYVDEKGVRSFETIPFSVALERRKQKLAVVPEENENKEKLLFYLSPNDLVYVPDEDEKLIDYRQLSINPTRIYKMVSSSGTQCFFIPHFVASPIVQTMELGPNNKSERAWDGQMIKNVCYKLSVDRLGNVKIEK

SEQ ID NO: 854 - protein, 1526 aa, Bacteroides faecis
MKKILGLDLGTNSIGWAVLNAADDNSLKYIEAAGSRIIPMDAAILGDFDRGNSISQTAERTRIRGMRHLRERYLLRRARLHRILNLLGFLPFHYAQDIDRYGNFSADMEPKIAWCKNLEGELEFIFIESFNEMLEDFRKNQPELVADNKKVPYDWVIYYLRKKALEKKISKEELAWILLNFNQKRGYYQLRGEDDDESMKTAKTRQYFDKQIIKNIIDTNQTYKGQRILIVELQNGDKGKIFKKEIPDWIGQEKNIIVTVDIDKDGNDKYEESGSLSCRFKIPTDAEWESEWKLIKMKTQKDLDESNKTVGTYIYDSILQNPTQKVRGKLVRTIERKYYKAELKQILEKQTEFHSELQDKDLYIECLNELYSNNDTHRNAITDRDFVYLFMNDILFYQRPLKSKKSLIDNCPYERNIYIDKETGEIKYSPIKCIAKSHPLFQEFRLWKFISSIRIYQRESVVEVVDKQLDLFSSQSTSVQKLVTDVDVTDKFLTCENDYVALFEWLNKKKIIDQKEFLKYRPFGLKGDIDNYRWNYVEDKSYPCNETHAMILTYFAKAGISEDILTKEMEEALWHILYSVEDRQEITKALRTFASKYHLSDSFVKVFSNIPPFKKEYGSYSAKAIKKLLSLMRMGKYWSEDAIDVNTRERIDKIVTGEYDEKIRDRVREKTIRLNDIRHFRALPDWLACYVVYDRHSETREITEWKSPEEIDEYIRNFKQHSLRNPIVEQVITETLRTVRDIWKQVGCIDEIHVELGREMKNPADKRKRITSQIIENENANLRVKALLTEFVNSEFEIENVRPYSLSQQDILRIYEDGVLNSVAEVPGDIAGILKKFNENDAKKRPTTSEILRYKLWLEQKYRSPYTGEMIPLSKLFTSAYEIEHVIPQSRYFDDSFSNKVICEAEVNKLKDNALGYEFIKKHHGEKVELGFGKIVEIFSVSVYEQFVKDNYSRNRGKMKKLLMDEIPEQFIERQLNDSRYISKVVKTLLSNVVREKAEQEAVSKNVIVCTGGVTDRLKKDWGINDVWNKIVLPRFLRLNELTNSTNFTAKNAAGNEIPAMPLELQKGFNKKRIDHRHHAMDAIVIACANRNIVNYLNNESASRKAKISRHDLQAILCDKVRTDDKGNYQWRVKKPWDTFTQDVYVALENIIVSFKQNLRVINKTSNYYWHYENGKKVLVKQVKGDSWAIRKPMHKDTVFGEVNLRKVKSVSLNEALKNPQFIVEKDLKRQLLSLLQQNFDIKKIKKYFEEHKDIWSDISLSKMNIYYFTKETKDRYFATRKPLDASFDKKKIESCITDTGIQQILLRHLELKENDPERAFSPDGIDEMNRNIIQLNKGKGHHPIAKVRVYEKADKFEVGQRGNKSSKFVEAAKGTNLFFAVYETEYPDEKTNSIVRKRNYATIPLNIAIERQKRGLSTAPEDEKGNVPSFVLSPNDLVYLPTSEDIVNGHITQPIDKSRIYKMVSSSGSQCFFIKHNIANIIVDKYEFSPLNKMERAISNEMIKEICIPVKVDRLGNIVKLGKSE

SEQ ID NO: 855 - protein, 1446 aa, Streptococcus sobrinus
MENQRGKRQRISHKEPYSIGLDIGTASVGSAVINNDLTVPRKRFKVRDINGNVIKTIKKNMSSVLIFDEANPAKGARTKRTSRRRYTRRNFRLLELKKLFEKEIEKIDPNFFHRIKEDSFFNWNDKEFDKHPLFGNLKEEKKFHNNYPTVFHLRNEIGKNSSKKFDLRLVYLALAHIIKYRGHFLDETFDPDASVSVEKRLNDFIVEYNELFDKDLSIEAKFSEILMSDSSNSVKIESILSLYPSEKNTIFQVFLKLIVGNQGDFNKFFKDELESSSHSGKLVFSSDEVEDEKEELISTIGEDYLDIINLCQSLYSTVALAKIINTDTGESNTPLSASMVKRYNEHKGDLANLKGIVKRFIPEKYEEVFGEQSKTGYTAYIRNPNKMPEKKFYDYLYHEGEKGKISGLLSDSRIYELPAVQKFILKIEQKSFLKKQRTKENGLIPYQLHLKELKIIIENQSEYYPFLHEIEEKLEKLLTFRIPYFVGPLAQTKYINPRFNWLVRKSEDHIKPWNFSEIVDEEKSATKFIEKLISNDQFLFGEKVLPKRSIIYQQFLIFNELTKVSYQIKDGPSRNFDSETKEKIFNSLFKKNKLGRVTVVDLKNYIKNDQCLSEKEDIQIEGIKKKFNSSYSTYADLSEISGLKELLDYDTRLDLVEEIIRILTVFEDKKMRTKQLSKLNLPSNVDIEKLCKKHYKGWANVSKKLIDGIIDGPRKSGKTILGYLKDDDILTKNKNNLNRNFAQLITDKSLDFARKLDESYKIDVKKDYPSLVEDIPGSPAIRRAILQSLYTVDEIIGVMGGMPENIVIEMARTNEVSDSPKTRKERIKKLIKETENDADALNFGISKVSEIFDEVKKDENLFKELEVYLYFLQKGKDMYVTETREAHRQPKEINFYDVKNSTGKYQIDHIIPQSLYSGNPLDNIVLTESTNNKIKDKDVPDKATVDEMKNFWLYLMKKGAISKKKFSFLTKIEQGGLSNEDKFGFINRQLVETRQITKHVARLLNALYEKDDVRIVTLKANMVTKFRKRNGLYKFRELNDLHHAHDAYLVAVIATKLLNVYPKIENELVYGKYRKESFIEKLSSDKAKQRVQFYDAIMKFFDKEEKRSQDNKEILWRKQSDLKVIRDFLDKGQVNVVRKTEKSTQGIDKKAKRNYGLFKETITKNNKHAKESGEKFVASIPIKEKLHGKKLDVEKYGGYQGLVTSFTILIFETGKKGKSKIENIPIFDRNKFEENPKAYLKEKYPNFEDYVELPKYSLLEFKKGYRRYLVSASELHPACQFRLPKRYWKFMYKMDKMIEKGVSDDSNIREELGEVNVEKMYEGLLEYCISFMKRNCLDKTFKDKKISYSETLQKNYYDKAFSDARFSSICAVHIEFRKLLSALTTKGGSTTDFFSEKGDKPLGFRYQGTGELKPDSKTGEANATLIRQSITGLYETRIDLGKLGED

SEQ ID NO: 856 - protein, 1064 aa, Ureibacillus thermosphaericus
MSKVLGLDIGVSSVGWGIIDTEKMEIIDAGVRLFEEATRNANEERRGFRGARRLKRRRNHRLERAKKLFEEFGIPTNCIGTGNPYEIRCKALKEKVSLEELAIGLYHIVKRRGTVLDAPLEEEKTGGELSTKEQLKRNSKELETKYVCEIQFERLKKGLVRSHENRFRTEDYIKEARAILNRQAQFHQEINDEFIEKYIELVQKRRAYYDGPGSKKSPTIYGRYFIKNGKFHEMSMIEKMRGKCTYFSDQPRIAKMSFTAELYDLLNGDLNKLQVNGEYLTEEDKKYIVEEIVKKGQKVTIDRILKYKGLPKDTDVRGYRVDLKNEKPIFTEFKGYKNILKLVKEHDLPKEILDNVELLDEISEILTAEKSYERRENDLKKALTNLAGFDEDTNEKIIAALKENTDFKGYHALSKKAIQLILPDLWKTNKNQMELFSELGLESKRYQNISNGKKIKFDDTAILSTVAKRAQREAIKIVNKVREVYGEMDSIVIETARENNSEEAKRKNDENQRKQKKFEKRVAEILSVSTLEELNLKPKQRLALKLWDAQDGQCLYSGERINPYDIVQDFYKFEIDHIIPISISFDDSQENKVLCYREENQEKGQRTPFHYLTSSPKAKRTFEEFRADVMKLYNSGKISNKKREYLLEQRDIMNNEELQKQFINRNLVDTRYAVRSFSMNLRSYFKHHNIPTTVLSIRGGFTNAIRRRARMNKDRNSSYAHHAIDALIVAAIGKLPVFKFFQNFGVNETGVFYDRRTGEVLTEKEFFSEDIYKFIRSLMNYESKIKYSHKVDRKGNRKVSNQTIYSTRVVNGEEYVVGKSDNIYTLNKKDAAKLIEKMRTKRDSFFIAKYNPELFDLLLKIAKEYEYADNPFKEYYEQHGYIMKDGKIPVKFLRYYEEKLGVYIDISKYYPGTQHRVILRSIKSVRIDVYKNREGKYKYLGVPYYWFKDKGNKLILDMEKYEEEKKKPYKNIDGSYEFQFSLYRNDLFSIEKKEKTFEYILLGDANSRQNILEADHVYKAKQKGDKRIFIKIGPTLQKLTKYNVDVLGNRYKIEKEDFKTTLQK

SEQ ID NO: 857 - protein, 1511 aa, Flavobacterium sp.
MAKILGLDLGTNSIGWAIVDKDGNDFSLVCKGVRIFSEGVKSEKGIESSRAAERTGYRSARKIKFRRKLRKYESLKVLSLNGMCPLSIEEVEDWKKSGFKEYPLNPEFLKWLRTSDDENINPYSCRDRASKQKVSLFELGRALYHITQRRGFLSNRLDQSAEGVFEEHCPQIQSVIEDVNTTDEILIELKDYFLNTGILDESIKGGFKKDLDEGEKKLKTLYNSLVAITKKNESEIEKCKEELFARLNKKEDLGKVKGKISEISQAMKDGSFETLGQYFNSLYSKGKIRNQYTAREEHYLAEFEIICKTQTIESIIDNEQLPEKRYRGLAKELYRAIFFQRPLKSQKGLIGKCSFEKSKSRCAISHPHFEEYRMWTYLNTIKIGTQSEKILRFLTQEEKLSLIPKFLRKKDNFNFEDLAKDLIEKGASFGFYKSSKRDSFHYWFNYKPTDTVSGSPVSTSFKNVIGEDWRIKTFTYPTLNSKGIEVNRTVDYKDLWHLLSVSTSDVYLYEYAKDKLKLEDKNAKSFSKIRLKKDFGSLSLNAINKILPYVKEGLLYSHAVFMANIEGIVDQAIWNDLAQRKYIQDKIAEIISNNTFDNGLLEVVNGLIKECKVEGAYYSKEAEPTYRKDLSKKLVSFFKYHEINDVLKQEKILKEVFPVFIEQLKAYEFITVKRLDEKVLEFLKGENEDGEVFCGNPKQLNKLYHPSDIDVFKKQKVRDENGKETGQLILGSPLTSSIKNPMAMRALHQLRKVLNALIVEGQVDERTRIHIEMARELNDANKRKGIQDYQNENKKEREKYKEEIKKLYLAECGKEIEPTVDDLLRYQLWIEQDRKEIYENGNSISICDIIGDNPKYDIEHTVPRSISQDNSQMNKTLCSQKFNRDIKKQKMPIELVNHLEILPRIAHWKKEAENYTREIEIIIRSTKTAATKEAKDKKIRRRHYLTLKRDYLQGKYNRFVWTEPKVGFKNSQIPDTGIITRYAQAYLKSYFKRVESVKGGMVAEFRKIWGIQESYQKDGKKYFIEKDRSKHTHHTIDAITIACMTKDKYDVLAHAWTLEDKEQVTDARKLLADSKPWKTFKEDLKKIEEEILVSHYTPDNVKKQSKKIVRIRGKKQFRDELLLDLSGNKIPIFGKRMNNDEIKSKVIGKDYFEIVSNNEKSFYEFLKDKNGDIVYKKTPLFQQGDTIRGSLHSAGNYGAIKMPQRNEKNEPIKNEKGAFILEKDKKDKDVIHFVERKALTKLSENDINNIVDPIVAQKIQKAVRDGFITFKMVQGKKVAVIKDDVIIWMNEEKKIPILKVRVFATTVKNPLEIKKHSSLSESRHKHKQMIYAQNDENYCMAIYELEGKRDFELINYFNLAKLQKQRQGYYLVNKEKEVNGKIVHIPIAKRNGRDLVLKRGKQVIFYDKEVENPDNIFDLEDLKSRIYIIEGLSIQRIVRPSGKIDEYGVIMFRYFKEARKADDIKKDNFKPDGGFKLGEIKPTRKMNHNQFNAFVEGIDFKVLSTGKFEKI

SEQ ID NO: 858 - protein, 1356 aa, Planococcus antarcticus
MLQSSNTLSVHFLLKNVKGEYFEMKNYTIGLDIGVASVGWVCIDENYKILNYNNRHAFGVHEFESAESAAGRRLKRGMRRRYNRRKKRLQLLQSLFDSYITDSGFFSKTDSQHFWKNNNEFENRSLTEVLSSLRISSRKYPTIYHLRSDLIESNKKMDLRLVYLALHNLVKYRGHFLQEGNWSEAASAEGMDDQLLELVTRYAELENLSPLDLSESQWKAAETLLLNRNLTKTDQSKELTAMFGKEYEPFCKLVAGLGVSLHQLFPSSEQALAYKETKTKVQLSNENVEEVMELLLEEESALLEAVQPFYQQVVLYELLKGETYVAKAKVSAFKQYQKDMASLKNLLDKTFGEKVYRSYFISDKNSQREYQKSHKVEVLCKLDQFNKEAKFAETFYKDLKKLLEDKSKTSIGTTEKDEMLRIIKAIDSNQFLQKQKGIQNAAIPHQNSLYEAEKILRNQQAHYPFITTEWIEKVKQILAFRIPYYIGPLVKDTTQSPFSWVERKGDAPITPWNFDEQIDKAASAEAFISRMRKTCTYLKGQEVLPKSSLTYERFEVLNELNGIQLRTTGAESDFRHRLSYEMKCWIIDNVFKQYKTVSTKRLLQELKKSPYADELYDEHTGEIKEVFGTQKENAFATSLSGYISMKSILGAVVDDNPAMTEELIYWIAVFEDREILHLKIQEKYPSITDVQRQKLALVKLPGWGRFSRLLIDGLPLDEQGQSVLDHMEQYSSVFMEVLKNKGFGLEKKIQKMNQHQVDGTKKIRYEDIEELAGSPALKRGIWRSVKIVEELVSIFGEPANIVLEVAREDGEKKRTKSRKDQWEELTKTTLKNDPDLKSFIGEIKSQGDQRFNEQRFWLYVTQQGKCLYTGKALDIQNLSMYEVDHILPQNFVKDDSLDNLALVMPEANQRKNQVGQNKMPLEIIEANQQYAMRTLWERLHELKLISSGKLGRLKKPSFDEVDKDKFIARQLVETRQIIKHVRDLLDERFSKSDIHLVKAGIVSKFRRFSEIPKIRDYNNKHHAMDALFAAALIQSILGKYGKNFLAFDLSKKDRQKQWRSVKGSNKEFFLFKNFGNLRLQSPVTGEEVSGVEYMKHVYFELPWQTTKMTQTGDGMFYKESIFSPKVKQAKYVSPKTEKFVHDEVKNHSICLVEFTFMKKEKEVQETKFIDLKVIEHHQFLKEPESQLAKFLAEKETNSPIIHARIIRTIPKYQKIWIEHFPYYFISTRELHNARQFEISYELMEKVKQLSERSSVEELKIVFGLLIDQMNDNYPIYTKSSIQDRVQKFVDTQLYDFKSFEIGFEELKKAVAANAQRSDTFGSRISKKPKPEEVAIGYESITGLKYRKPRSVVGTKR

SEQ ID NO: 859 - protein, 1471 aa, Scardovia wiggsiae
MGYKAPRNDKGEIDYGVGLDLGNGSVGWVAMDKDYHLIRARGHELIGARLFDPANSAENRRESRTTRRRLSRRRWRLRMLDSLFASELAKIDPNFLARRKYSWVHPKDEQNHENWYGSIIFGSKEQDKQFYKDYPTIYHLRKKLTEDTERHDIREIYVAIHHIVKYRGHFLREGEINSENLFDPEGFVELIKDVIKLNNSYDESTPIFEASPADVSEALLNEHTSRSGRIEDTLDKLDFSVSRVDKHELKGMRDAAKAVIGAIVGNTADFSKIFNLDNLDKDSKDNLKLKFADSNFDEKYGGVVGSGLLDETQIELVDRIHAVYDAVALKGILGDAHTISEAKVESYEKHRKNWKLIKEELRTKENKDEVDLWYGDLSGRQYKNPPDPEKGPDEGSKKDSPIRDSDQKQNLIKKANDYFTELIDDSQLSEEQKNCLKNDINNGQLFPVQRSSDNGVIPYQIHLNELRRIIENQKQYYPFLAETFIRKTAEGKSYEENKIVALLKFRVPYYVGPLVSKEDMEEHSSGNSAYHWMARNPGRGEAITPWNFDEVVDKDESGARFISRLTGTDTYLLGEPTLPQHSLLYEEYMVLSELNNVRLNVRQGNHWSDKNRQRLSYKQKEFLIENLFKEHKTVTRKRAEDCLSSMGCGEVQLFGLSDEKKFASSLSSYITLKKILGKAFVDDSGNSAILERIIEVQTVFEDREPLTHQLSLIDSLTVEQRKQLAKIHYTGWGKLSRKLLTSKKGSYKIHSQNEIMRTQHSIIDIMRGDSLNLIEIIRDKKIGIGEWIDNENLDRETGESDVSRLESVFEGIVMSPRVKRGVVQAVRVIDDLAKAIGNPPQRIFIEMADEVQASQRTVSRLSRLKALYGSPSLQKEFNDLKDLRKSLNETKDADLQEDRLYLYYIQLGKDLYTGKEISIDSLSSAYDIDHIVPQALTQDDSIDNRVLVSRKENARKTDSYLYTPDLIKNMRPLWGKLLAAGLMSQKKYDALTRVDDFKDREKQRFVQRSLVETRQIMKNVSTILRTYYGEDTNVVTLKSSITHDMRKYLGFPYKNRDINDYHHAQDALCISAAGQFMLNRHFVSGGEVTDGASNAYNMYLAEYLQEFRDAKARGERKRSTAFGFVVGSMSSKDDEKRTDHRTGEIVWSETNAEYLRKVMNYKKMLITQKVGDVKTRALYDETRYGHKESSAKSIKFDNLRRDTSLYGGFSGASTAYMMLVEYKKKNKLVSITAQEASLLAVADQKNDTVSVMDGILASHGLSGAKILLPKIVTGQLLDYSDALVTLQSASELNTARQMWLPRNDYNDIDIILKSKDIEDAAHKLGYDSDTVHVLRRIQKLFEAVFRVAESQFPLHQLSKDQQEEILRDPQNYGFGSAVKLLGGLLKALHANAENTNLAGLVKVLHGDKEYSDDGKAKEFKKFGFSPRWRRISNPTGFTLSDSDTFIYQSPSGIFEQRVTVKELKEKADKQK

SEQ ID NO: 860 - protein, 1128 aa, Streptococcus mutans
MANGKILGLDIGIASVGVGIIDKETGKIIHVNSRIFPAATADSNVERRGFRQGRRLVRRKKHRKVRLADLFLDSNLLTDFSKVSLNLNPYQLRVKGLNEELSNEELFIALKSIVSRRGISYLDDASEDSGANSSEYGKAVEENRKLLEDRTPGQIQLERFEKYGKVRGDFTVVENGENHRLINVFSTSAYKKEAERILRRQQEFNIRIADEFIEAYLTILTGKRKYYHGPGNEKSRTDYGRFRTDGTTLDNIFGILIGKCTFYPDEYRAAKASYTAQEFNLLNDLNNLTVPTETKKLSEEQKRQIIEHAKTVKTLGAPTLLKYIAKLVGCSADDIKGYRIDKSDKPEIHTFEAYRKMRTMELIKVDDLSRESLDALAHILTLNTEREGIEEAIRDRFTNKEFNQEQINELVLFRKNNSSLFGKGWHNFSLKLMKELIPELYETSEEQMTILTRLGKQRVKKSSNRTNYIDEKELTEEIYNPVVAKSVRQAIKIINLATKKYGVFDNIVIEMARESNEDDEKKAIQNAQKANEDEKKAALLKAAHQFNGKEELPDSIFHGHKELLTKIRLWHQQGEKCLYTGKTIFINDLIHNPYKYEIDHILPLSLSFDDSLANKVLVLSTANQEKGQRTPFQSLDSMDGAWTYREFKAYVKGLKTLSNKKKDYLLNEEDINKNEVKQKFIERNLVDTRYSSRVVLNTLQDFYKKREFDTKISVVRGQFTSQIRRKWRIEKTRETYHHHAVDALIIAASSQLNLWKKQNNPLISYKEDQFVDPETGEILSLSDDEYKELVFKAPYDHFVDTLKSKKFEDSILFSYQVDSKYNRKISDATIYGTRKARLGKDSQEETYVLGKIKDIYSQKGYEDFIKKYKKDKTQFLMYHKDPQTFEKVIEEILKTYSDKELNEKGKEVPCNPFEKYRQENGPVRKYSKKGNGPKIKSIKYYDNKLGNHIDITPNNSHHQVVLQSLKPWRTDVYFNPKSGKYELMGLKYSDLRFEKVSGDYGISVKKYNEIKSKEGVDENSEFKFTLYKNDLILIKDTESGEQELFRFLSRTMPNQKHYVELKPYDKSKFEGHQKLMDIFGEVAKGGQCLKGLNKSNISIYKVKTDVLGNKYFIKKEGDQPQLNFKKKI

SEQ ID NO: 861 - protein, 1355 aa, Streptococcus mutans
MKKPYSIGLDIGTNSVGWAVVTDDYKVPAKKMKVLGNTDKSHIKKNLLGALLFDSGNTAADRRLKRTARRRYTRRRNRILYLQEIFAEEMNKVDDSFFHRLDESFLTDDDKNFDSHPIFGNKAEEDAYHQKFPTIYHLRKHLADSTEKADLRLVYLALAHMIKFRGHFLIEGELNAENTDVQKLFADFVGVYDRTFDDSHLSEITVDASSILTEKISKSRRLEKLINNYPKEKKNTLFGNLIALSLGLQPNFKTNFKLSEDAKLQFSKDTYEEDLEELLGKIGDDYADLFTLAKNLYDAILLSGILTADDSSTKAPLSASMIKRYAEHHEDLEKLKEFIKANKPELYHDIFKDETKNGYAGYIENGVKQDEFYKYLKNTLSKIAGSDYFLDKIEREDFLRKQRTFDNGSIPHQIHLQEMHAILRRQGDYYPFLKENQDRIEKILTFRIPYYVGPLARKNSRFAWAEYHSDEAVTPWNFDQVIDKESSAQAFIEHMTNNDLYLPNEKVLPKHSPLYEKYTVYNELTKIKYVTEIGEAKFFDANLKQEIFDGLFKHERKVTKKKLRTFLDKNFDEFRIVDIQGLDKETETFNASYATYQDLLKVIKDKVFMDNPENAEILENIVLTLTLFEDREMIKQRLAKYADVFDKKVIDQLARRHYTGWGRLSAKLLNGIRDKQSCKTIMDYLIDDAQSNRNLMQLITDDNLTFKDDIVKAQYVDNSDDLHQVVQSLAGSPAIKKGILQSLKIVDELVKVMGKEPEQIVVEMARENQTTAKGRRNSQQRYKRLKEAIKSLDRDLNHKILKEHPTDNQALQNNRLFLYYLQNGRDMYTGESLDINRLSDYDIDHVIPQAFIKDNSIDNRVLTSSKANRGKSDDVPSEDVVNRMRPFWNKLLSSGLISQRKYNNLTKKELTLDDKAGFIKRQLVETRQITKHVARMLDERFNKEFDDNNKRIRRVKIVTLKSNLVSSFRKEFELYKVREINDYHHAHDAYLNAVVVKALLVKYPKLEPEFVYGEYPKYNSYRERKTATQKMFFYSNIMNMFKSKVKLADDQIVERPMIEVNDETGEIAWDKTKHITTVKKVLSYPQVNIVKKVEEQTIGQNGGLFDDNPKSPLEVIPSKLVPLKKALNPEKYGGYQKPTTAYPILLIVDTKQLIPISVMDKKRFEQNPVKFLKDKGYQQIEKNNFVKLPKYTLVDIGNGIKRLWASSKEVHKGNQLVVSKKSQDLLYHAHHLDNDYSNEYVKNHYQQFDILFNEITSFSKKCKLGKEHIQKIEEAYSKERDSASIEELADGFIKLLGFTQLGATSPFSFLGIKLNQKQYTGKKDYLLPCMEATLIHQSITGLYETRIDLSKLGGD

SEQ ID NO: 862 - protein, 1350 aa, Streptococcus mutans
MKKPYSIGLDIGTNSVGWAVVTDDYKVPAKKMKVLGNTDKSHIEKNLLGALLFDSGNTAEDRRLKRTARRRYTRRRNRILYLQEIFSEEMGKVDDSFFHRLEDSFLVTEDKRGERHPIFGNLEEEVKYHENFPTIYHLRQYLADNPEKVDLRLVYLALAHIIKFRGHFLIEGKFDTRNNDVQRLFQEFLAVYDNTFENSSLQEQNVQVEEILTDKISKSAKKDRVLKLFPNEKSNGRFAEFLKLIVGNQADFKKHFELEEKAPLQFSKDTYEEELEVLLAQIGDNYAELFLSAKKLYDSILLSGILTVTDVSTKAPLSASMIQRYNEHQMDLTQLKQFIRQKLSDKYNEVFSDVSKDGYAGYIDGKTNQEAFYKYLKGLLNKIEGSGYFLDKIEREDFLRKQRTFDNGSIPHQIHLQEMRAIIRRQAEFYPFLADNQDRIEKILTFRIPYYVGPLARGKSDFAWLSRKSADKITPWNFDEIVDKESSAEAFINRMTNYDLYLPNQKVLPKHSLLYEKFTVYNELTKVKYKTEQGKTAFFDANMKQEIFDGVFKVYRKVTKDKLMDFLEKEFDEFRIVDLTGLDKENKAFNASYGTYHDLRKILDKDFLDNSKNEKILEDIVLTLTLFEDREMIRKRLKNYSDLLTKEQLKKLERRHYTGWGRLSAELIHGIRNKESRKTILDYLIDDGNSNRNFMQLINDDALSFKEEIAKAQVIGETDNLNQVVSDIAGSPAIKKGILQSLKIVDELVKIMGHQPENIVVEMARENQFTNQGRQNSQQRLKGLTDSIKEFGSQILKEHPVENSQLQNDRLFLYYLQNGRDMYTGEELDIDYLSQYDIDHIIPQAFIKDNSIDNRVLTSSKENRGKSDDVPSEDVVNRMRPFWNKLLSSGLISQRKYNNLTKKELTLDDKAGFIKRQLVETRQITKHVARMLDERFNKEFDDNNKRICKVKIVTLKSNLVSSFRKEFELYKVREINDYHHAHDAYLNAVVVKALLVKYSKLEPEFVYGEYPKYNSYRERKTATQKMFFYSNIMNMFKSKVKLADDQIVERPMIEVNDETGEIAWDKTKHITTVKKVLSYPQVNIVKKVEEQTIGQNGGLFDDNPKSPLEVIPSKLVPLKKALNPEKYGGYQKPTTAYPILLIVDTKQLIPISVMDKKRFEQNPVKFLKDKGYQQIEKNNFVKLPKYTLVDIGNGIKRLWASSKEVHKGNQLVVSKKSQDLLYHAHHLDNDYSNEYVKNHYQQFDILFNEITSFSKKCKLGKEHIQKIEEAYSKERDSASIEELADGFIKLLGFTQLGATSPFSFLGIKLNQKQYTGKKDYLLPCMEATLIHQSITGLYETRIDLSKLGGD

SEQ ID NO: 863 - protein, 1483 aa, Tannerella forsythia
MKTILGLDLGTNSIGWAKISIDDNGNYLRDIQMGSRIIPMSQDVLGNFDSGVTESQTAVRTGFRGLRRIRERSLLRRERLHRVLHVMGFLPPHYDSAIGWNKEEPTTYGKFLNHGEPKLAWERQGDGSMRFLFMDSFHKMMEDFAPHQPALVADGRKIPLDWTLYYLRKKALTQPIKKEELAWILLNFNQKRGYYQLRGEEEEENPTKREEYHELKVVSVEAAEEGKGGNTWYNVKLENGWIYRRSSKIPLDDWVGKTRPFIVTTEYEADGITLKKNKEGEVKRSFRAPGEDDWGLRKKRTESQLEASGKTVGAFIYDHLLAEPADKIRGNFIRTIERKYYKQELADILREQSKYHEELQSKKILADCAEELYRSNQPHRDSLLKKDMVYLLLTDIIFYQRPLKSKKSLIADCPYEYYEYVDKETGEIKRQGIKCVAKSNPYYQEFRLWQFVLNLRLYDRTEDKEVTAEYLPSKEDYARLFVYLNDRKEINQETLLKDFFKLKKVKQRSEKEFPVRWNYIEDKEKKYPCNETRHELLMALDRAGIERSWLDDTARQCRLWHLLYSIEVKDEAERALRKLKDDDEFVSAFLKVKPFKKDYGAYSEKAVKKLLAVMRMGSHWCEDDICKETKERIEHILQGDVEEKIKERMNHTAYSLGELSDFQALPEWLACYVVYGRHSEATDIKHWKTPESLMAYINGFKQHSLRNPIVEQCILETLRTVHDIWKEAGHIDEIHVELGRSMKSTSDQRARMTENILRNENTNLRIKSLLMELKNDADIKDVRPYSPMQQEILRIYEEGALQELTKEDNDYEEIFKISKMPQPSAKELLKYKLWLEQKYRSPYTGKPISLSKLFTSAYQIEHIIPQSRYFDDSFNNKVICESEVNALKGNMLGYEFIKNHGGEIVHCTLLGDVKVQNESEYKAFVTEHYANNKYKKEKLLMEDIPQDFLNRHLNDSRYISKVVKTLLSNIVRTEDEMETTSKFVVSCTGGITDRLKKDWGLNDVWNSIVYSRFERLNELTKSDAFGRWENKEGKRVFQTSVPLELQRGFNKKRIDHRHHAMDALVIACASRNIINYLNNESANSPKKREDLRQQLCDKNRIIRKPWESFTQDARAALEDVVVSFKNYVRVINKATNYYERYDADGKKTITKQKSREMWAVRKPMHKETVFGHVNLRRKAIVKLKDALENIPSICNKELRDYINGLVERNFNTKQLHAHFRSTDYRWNKQNVDKVEVWRFSDEKEPLVATRKPLDTSFDAKRIDTITDTGIQKILLNYLEAKGGDPLIAFTPEGIAEMNQNIALYNDGKMHQPILKVRISEPKGAKYQIGQTGNKADKFVEAQKGTNLYFAIYEDEDRNRTYNTIPLNEVAERLKQGLPPVPEKNEKEVPLKFYLSPNDLVYVPTEEEILMKECKLNKNRIYKMVSSTGNQCFFIPFRVAVSIVNKMEYSPLNKMEKAISSEMIKAVCWKLEVDRLGNIIRVVK

SEQ ID NO: 864 - protein, 1407 aa, Chryseobacterium sp.
MIRNILGLDLGVSSIGWAYVQEDSKNSENNRIIKLGVRVNPLTVDEQLNFEKGKPITTNAGRTLARSARRNLQRFKLRRSNLMDVLKKNNILKETDLLAEVGKNSTFQTQELRAKSAKEKIELSEFARVLLLINKKRGYKSSRKAKNDEDGQIVDGMAVAKKLFEENLTPGEYSYQLLQQGKKQLPDFYRSDLQAEFDKIWDFQKQFNPEIFTNELYEKLQGKNRNATWKELEFPFSLVGIKQTGTMQEKKVEKYFWRSEAVKKQLDFESLAVVFQEINSNLNNSSGYLGAISDRSKELYFYNQTVGEYLFQQLKTNPHTKLKNQVFYRQDYLDEFEKIWETQSKYHKELTKELKEEIRDITIFYQRKLKSQKGLISICEFENREIEITENGKTKKKTVGLKVAPKSSPLFQEFKIWQVLNNLQFQNIETKEVFPIDLDFKQSIFDEVNIKGKLSAKDVLDLVGYSGKEWKTNFKEIEGNYTNENLYTAFLKIIASKEIEFPKEFKITIDDEIKVSKINASAEIIKLFVREKFSELGIDTSILDFNPELEGSDFEKQASYQLWHLLYSYEGDDSSSGNEKLYELLENKFGFKKENSKILAEIGFSQDYGSLSSKAMRKIYPYIKEHKYSVACSYAGYNHSKNSLTKEQLENRILKERLDILPKNSLRNPVVEKILNQMINLVNCLIDEYSEKDKDGQIVKYFKFDEIRIELARELKLNAEERATMTSEINKATIQHQKYAEVLQREFGLKAPSRNDIIRYKLYLELANNGFKDLYTDAKIERENLFTDKYDIDHIIPQSRFFDDSFSNKVLVPRNANLKKGNFTAFDYLEIEGKEKLEKFLNIIKDLYDKGAITKAKYEKLQKKDFEIGDGFIERDLRNTQYIAKKSKEILFGITNSVVTTSGRITDKLREDWNLINTMKELNLEKYRKLGLTETVINSKGEEKQRIIDWTKRNDHRHHAMDALTVAFTTHNHIQYLNYLNARKDEKHKEHQNIFAIENLITEIIDKKNGSKERRFKEPVKNLRAEARKHLDEILISHKVKNKVVTKNINKIKKKGSVIAKTELTPRGQLHKETIYGSSKFLKTKEEKISGKFDVETIQKVQNERYRNALLKRLQEFGGDSKKAFTGKNVISKNPIFLNNEKTEQLPETVTLAWYEMGYTIRKAVNPDNFKDFKNIEKTIDKGIRDILTKRLKEFNGNSKEAFSDLDKNPIWLNKSKGISIKAVTITGINNAEALHYKKDHLGKDFLDENGKRIAVDFVSTGNNHHVAIYEDENGNLQEKVVSFYEAVERVNQNLPIIDKEYNSESGWKFLFTMKQNEMFLFPSEDFNPKEMDLFDEKNVNLISKNLFRVQKFTIKDYFFRHHLETNVEDSSPLKGITWKREGLNGIENILKVRLNHLGKIVQIGEY

SEQ ID NO: 865 - protein, 1125 aa, Streptococcus suis
MSNGKILGLDIGIASVGVGIIEAQTGEVVHASSRIFPSANAANNAERRDFRKSRRLVRRKKHRIKRLEDLFATYQVELKGELSSENPYILRVKGLSQKLTVDELYIALKNIMKRRGISYLDDAEADGEAGQTDYAKAIERNRKLLDNKTPGEIQLDRLEKYGQLRGNFTIIDDEGQPQQIINVFSTSDYAKEVKQILECQKAYHTFISDDFCDNMLHLLTGKRKYYIGPGNEKSRTDYGVYRTDGTTLENLFGILIGKCTFYEDQYRSSKASYTAQEFNFLNDLNNLTVPTETKKLSQDQKECLVEYAKHTTTLGAKKVLQQVAKIVGCEVDDIKGYRLDNKDKPDMHTFEVFRAMKGLVPLVDIEDLSREQLDVLADILTLNTDFEGIQEALDRQLPDLFNHEQVKELASFRKAKSQLFARGWHSLSQKMMLELIPELYATSEEQMTILTRLGKFQKNDEEKGNTNTIEVDEVVEEIYNPVVAKSIRQTIKIINAATKKWGEFDQIVIEMPRDRNEDEEKKRIADGQKANAKEKVDSIKRAAELYCNGKELPDHLYHGHKQLATKIRLWYQQGERCIYTGQPISIHDLIHNQNQYEIDHILPLSLTFDDSLSNKVLVLATANQEKGQRTPYRYLQSTTAAWSYREFKDYVNKCRGLGKKKCEYLIFEEDIDVFEVKSKFIQRNLVDTRYASRVILNALQDYYKTSGKSTKVSVVRGQFTSQLRRKWGIEKTRETYHHHAIDALIIAASSQLKLWKKQENPLLIDYQKGQQIDLETGEILELTDEQYKELVYQPPYQGFVRTISSPAFEDEILFSYQIDSKVNRKLSDATIYATRKAQLGKDKVEETYVLGKIKDIYTQAGYEAFSRRYHKDKTSFLMYQKDPDTWEKVIEIILRDYREFDDKGKEVGNPFERYYKENGYIKKYSRKGTGPAIKSLKYYDNKLGNHINITPENSRNAVVLQSLYPWRGDVYFNPESGKYELLGLKYSDLRYQKRTGDYGITQEQYNIIKVQEGISEESKFKFTLYKNDLLLVCDSSTKEKQLFRFLSRTLPNQKHYVELKPYDKAKFDAGQELLSTLGVADKIGRCIKGLGKKNISIYKVRTDVLGFKYFIKQEGDQPQLNFKNK

SEQ ID NO: 866 - protein, 1050 aa, unidentified
  REGION 1..1050: note = NCBI_AQRO01000059:170931886_7
MSKGKIFAFDIGTGSLGIAVRDGDEIIEARSLLIPPDFASTKEQRERRRQWRTRIAHKKREEWLQQICKKAGIEVLEGRKPGYKKKGISSQKGDPRLEREFASPGDDTVYTSCLLRIKLLRGEKLEGWQIYKALHSAIQRRGFDPSIPWKRKAIKKGITNKEDVKNNDMSDDNKDEKENLKKAREYEKTLMEITHGKEDWNYPCYFDAYCMKLWNPETDELRFIQTHEAERARSNEFSPSRRLVEKELRDLINAAAKQCPSLVGKTDYIMYGPTETSYASYYPKLRKQYGIKEGGENDWQGAISQKIPRFDNRMPDKCALIPRYNVCRARDHLTMKFTFLMKLKNMRYKDSFHQEHMLTAEDIRVIFDEKTEKVAKKKKELITKGTGKNIDYEKMSKIYQYTSNQWTNWLKKYKNGYSCVNHEKVDPPKISGRARYCRPAMRIMCDLILSGKSPWEFYNQLLEKMDNENPKKGLVNEDIEFLLKLPDNWEGIYIPQYTLAERFMEGEINRDSAIKKVINKQRDPIIRHRMEIFKNYIDRLTNEYGIPEKVVIELVRQDFLGPKAKRAFEKWQRENRKRNEEARNRAKELGISGHEGRTKLRLFKQQNGYCLYTGENLSENELEQYEIDHIVPRGGGYNGSDSFINKVVTKAKTNHDKGDRTPYEFLSQSGKWDAYLERVKKVTSSLGKKKSALLTSEHPEELDEKYTQLAETAWIARIARDIVCLFYGWQYGEKGELEKALVVDGKLTSNVRAKYGLNTLLAGGNETDPEKRKEKNRDDKRHHALDAMVLSFITRNKPDLPEGVHKELFRKWINKVVPEQIAFEKPQLEETIYGKRTIYERNKEKEIIVKRVDLKDMAYRNGKYDKIKAQKEIQGILDVTLRKRLERFLETNPEKETWNSFIDNLRQQDRWGSRVKKVRIYEGEPDEYANLSKTDDKGQFRRGDKHRGQFVYLSEKKIPKVRPVYVFESVKSVKNELLKEGYEIIDFFKSGFLIEIGKSFDYNGRFIPSGKYLLSSLRSNGQVQLNSTHPNLKNPIGISALLKAGFIRIK

SEQ ID NO: 867 - protein, 1457 aa, Bacteroides propionicifaciens
MKKILGLDIGTNSVGWAIINKDSDGPQSIVNLGSRIIPMSQDVMDKFGKGQTVSSTAERTGYRGVRRIRERSLLRRERLHRVLHILGFLPKHYDQVIGWDRSDNRTYGKFLPGIEIKLSWVPTDSGNQFLFMDSYLEMLKELKQEQPELFETSDTPAPMDWTLYYLRKKGLKQALRPAELAWIILNFNQKRGYYQLRGEEQEVDPKKREEYHALRVVRVEVDPESGSLSKPWYNAYLENGWIYRCQSNKPLDSWVGMIKDFIVTIHLADDGSEALDREGNVRRNFRAPGEDDWTLLKKKTESDLQKSGKTVGAYIYDTLLKQPSQKVRGELVRTIERKFYRNELELILDKQLEFIPELKSKELFDACANELYPSNHNHRANLLTKDFKYLFVNDIIFYQRPLKTKKSLIANCPYERRSYKKDGERVYVPIKCIAKSNPYFQEFRLWQFIENLRIIQHQKEMDDSIQYNVDVTSDYLPDEVSYVKLFDWLNERKEVKEDQLLRNFFNLKKDKISKEFSVSWNYVKDRTYPCNETRALLISGLEKCDSLSWLDSKEKEYRLWHLLYSVEDPKELRGALAKLADKESLSSDFVDIFSKLPSFEKDYGSYSEKAIKKILPIIRKGSYWSADAIDSRTQKRIQQIIDGEVNESIDMRAREKLESLREIAAYKGLPLWLAGYVIYNRHSEAGEIKKWNTPEDLEYYLTHEFKQYSLRNPIVEQIILETLRLVKDLWEKYGDLSEIHLELGRDLKNPAKKREADTKRNVDNENEWMEIQEKMLEFHREGLISNPYSPSQKMKYKLWLEQNHISPYTGEAIPLTKLFTSSCEIEHVIPQGRYFDDSFTNKVVCESEVNKLKSSMLGHEFIKSKGGEAVLIGGTQVRILSVPKYVALVDRLYSSTNPTKASKLLLEDIDDLNKDFSERQLNDTRYISRYAMSILSAIVREDDEKESVSKNIITCSGKITDVLKRSWGLKDIWDGLIQPRFERLNTMYDTQEFGKWVTSNKFQVRIPLELQRNVSKKRIDHRHHAMDALVIACATRNHTNYINNMSAWRGEDYKKVRYDLKKKLIDENSSERDTFIKPWPNFTVDAKKALERIIVSHKKNLRVLTATVNHTEYIDNQGKRQLKKQESNDHYAVRKPLHQETIFGRVSIRSIKQVTLSKALENYKSIVDKHLKAKVREVIAEYGGKVDSKTLNKYFKDRDYKYEGLDIKRVEVYHYDHDCAATRKPLNDSLTLKQIEKVTDESIRKILYNHLDNYAGDLKEAFSVEGLVAMNKNIKTLNGGVPHHPIYKVRLFEDLGSKFALGTTNNNPSKFAVAAKGTNLYFGVYVDENGKRSFDSIPFNVVLNRIKSGLSPVPDVFGKSNLLFYLSPNDLVYIPSSIELNEEFCINEINNNRLYKMVSSTGFQCFFSQNNMAQSIWDKKEFSALNKMERDIEGNMIKQVCWKLVVNRIGEITDVIR

SEQ ID NO: 868 - protein, 1126 aa, Streptococcus henryi
MTNGLVLGLDIGIASVGVGIIEAETGKVIHASSRIFPAANADNNAERRGFRGGRRLTRRKKHRVKRVRDLFDDYNIATDFSNLNLNPYELRVKGLTEELTNEELFAALRNISKRRGISYLDDAEDDANSGKTDYAKSVLANKELLKTQTPGQIQLDRLNKYGQLRGDFDVVDENGEIHRVINVFSTSDYRKEAEKILQTQSQFNNAINQEFINDYIDILVSKRKYYHGPGNEKSRTDYGRYRTDGRTLENIFDILVGKCTFYPEEYRAAKASYTAQEFNFLNDLNNLTLPTETKKLSIEEKLYLVDYAKNTPVLGPDKLLKEIAKLVDCKKEDIKGFRIDNKEKPDMHTFEVYRTMSKLDKVDIQTLSRETFDELARILTLNTEREGIEEAILKDLPNQFTNEQIEELIKFRKDKSQIFGKGWHNFSVKLMLELIPELYDTSEEQMTILTRLGKTSANKKEVKRTKYINENDVTEEIYNPVVVKSVRQAIKIINASVKEWGEFDNIVIEMPRETNADDERKFIKKMQDANAKEKKDSEERAATLYNGKTELPSNIFHGHNQLATKIRLWYQQGERCIYTGQKIDINDLIHNHNMYEIDHVLPLSLSFDDSLANKVLVLATANQEKGQKTPFQSIPQMKSAWSYREFKSYVLGCKGLSKKKREYLLTEEDINKIEVKQKFIERNLVDTRYASRVVLNTLQDSLKAMNKKTRVSVVRGQFTSQLRRQWKIDKSRETYHHHAIDALIIAASSQLRLWKKQGDTMFEDYKNGQKVDLETGELLSDNEYKELVFQSPYQGFVNTISSKAFEDEILFSYQVDSKVNRKISDATIYATRQAKLTKDKKEETYVLGKIKDIYSQAGYDAFRKRYEKDKSAFLMYQKDPMTWEKVIEVILNDYCEFDDKGKETGNPFEKYRNENGYIRKYSRKGKGTEIKSLKYYDSKLGNHIDITPENSKNSVVLQSINPWRADLYFNPKTLKYELMGLKYSDLSFEKGTGNYSISQDKYDEIKSREGISPKSEFKFTLYKNDLILIKDTINNKTLTARFNSKNDTSKHYVELKPDSKAKYDSEEVLIPVFGKVAKSGRFIKGINKTGISIYKIKTDILGRKHFIKEEGDQPKLEFMKSSKNNK

SEQ ID NO: 869 - protein, 1049 aa, unidentified
  REGION 1..1049: note = NCBI_ASKP01000047:127544_4
MKRYRLGIDLGATSLGWSMIELNEDNTPKDLLDLGVRIFPDGRDAKTNEPLNVQRREHRSMRRNRDRYLQRRTYLLDTLVKYVLMPQNEHERKQLEYLDPYVLRAKALDEEITLYELGRVIFHINQRRGFKSSRKMDSAEKETSRMKEAIKELKQRLDNVGARTLGEYLFNLNKDIPQKNQNKLRPLRIRDYGKEYNLYTDRKMYENEFDMIWNKQSTYHSELTEDVKEHLKQIIFFQRDLKPQPKGKCRFEIGEPRCPVAFPVYQQFRIYQEVNNLILLDYDRKEHELTKAQREMITQTLLKQKSATFKSLRKKIGKEYAGDYVFNLESEKRKDMKGDETSFILRKIENFGIKWNELSEDEQDEIITRIINEDNDIEIEKNLITWLCKSFGLKNENAENISNVRLPRGIGSVSKKAIRKILPYLKEGFLYHEACQKAGYHHSDFRTGEIYDEGNLPYYGKIMQHHAAFGSDDPNDIEEIQYGKIANPTVHIALNQLRKFINALAEKYGAPTQIVVELARELKLGQKRLREIEKEQTHNRKHNEEIAEELKKVGIENKYQNRLKYKLWEELDGDPAKRCCPYTGKQISISDLFSNKFEIEHILPKSKTFDDRPTNKTVSYYIANKFKGERSPFEAFGESPENYNWDKILERCENFPPNKRWRFYPDAMKNFEDQGELISRMLTDTQYMSRIAKEYMSYVCGPNNVWAIPGKLTSKFRAKWGLNELLSEDSKKNRADNRHHAIDAFVVACTDRAMLQKVARATESTRERFIEKMPPPFEVFCHDEMQEKVNNIVVSYKPDHGNAKAAILRNQTVGQLHEETAYGFVSEDEEKGKITLSVRKPLISLESVKNINEIASSKIRNELLTLAEGVPKNEIKAILANYSERTGIKRVKLHVEKDKKTVIPIKNKNGEIYKYYLSGNNYCADIYCPNKGEKDGKWQIEIIPMFKAHKQDFEPEWHKKYPTAKKIMRLFINDYVAYDDEGKRKIKRVKKMSVDGRLFFIDPKIAKTEKEPNATSVKQLQERNARKIGVDILGKIYDSQKKNENSRDK

SEQ ID NO: 870 - protein, 1068 aa, unidentified
  REGION 1..1068: note = NCBI_ASNV01000012:3456765130_16
MSDSNFYSPYVLGLDLGSNSIGWALIKLDNDDNPCGIEKVGVRVFEAGMEGQYESGKEESRNKKRRDARLVRRQIERRARRYRRLANVLQQIKLLPEGNLNDSLERKNIIDNLDVELRKMYIKEDLPEYEKNRLNQIFLYYLRSLAVGQKLEPYALGRVLYHLGQRRGFLSNRRGQKKDDEEKGKVKEGIAEIRKEMACLGARTLGEYFAKIDPIAEQKRIRGRWTARDMYEQEFYTIWDQQAQFYPDILNDENKKLVFKTIFYQRPLKSQKEKIGFCQFECIARGGQRNRRRAPWVILKAQRFRLLQKVNDLEIKEDKFNKRPLTGEERKVVIDYLEKNGDTTFAQLRKILSLPKTVKFNLEEGGEKKIPGNKTASAIRNVIGERWDNMNAEERDKLVEDIYSIVNNKALERRLIKHWKFSEEEALQISEMIIEDSYCNLSRQAIDKFLPGLEEGRRYGELVKEIYGMDNVRDEFKVDLLPPLEEAPIGEIRNPTVTRTLAEMRKIVNELVKRYGKPRFIRIESAKDLRNTKKEREKIWKNNRDLEENRNKIRQELINRGIPNPTRSDIEKYMLAEECGWKCPYTGRPINGFNALFGSEPQFDIEHIIPLSRCLDDSFKNKTLCYHEENRTRKHNKTPYEVYAFDESRWEAILGRVEKFNSHCAAEKLRRFKLHGKALEDFIDKFSSSQLNDTRYASREACMYCGLLYGSEYRKHIFAVSGSATSVIRRMWDLNKILGSPEKNREDHRQHAIDAIVIAITSPSMVKRISEQAENIPIKERKNKNWWRFIEPPWATLSKEAEEKVLSIIVSHRPERKVSGRLHEETNYSPPKIDENGETVVHVRKSLSNISKGEIDDIVDPIVRKAVQDKLIELGGDPKKAFADPMNYPLMPNKKGLQIPIKSVRVKKKVPVFPVGEKERVRYVTSDENHHIEIFETKDKKGRTVWDANVVSMFEAMQRKKRGEEIIQRKLIRDGKEVEDAKFLFSLCKGDIVFMKDIKDESKYEYFKLIKMDINCVLMFLPIYMARIPEKNGKKDFTGLTRRLSSLLSSEAKKHSVNILGESQIAHD

SEQ ID NO: 871 - protein, 1028 aa, unidentified
  REGION 1..1028: note = NCBI_ASWY01000120:2294253111_16
MSKKVFAFDLGTGSLGVTVRKGIEFKEIHSYILPPEFASLKDQRERRRQYRTRLSHKAREDWLKKNCREAGIEILEGQKPRNKKEGTEPKPGDPRLEREFAEKGDDTVYTSCLLRILLLRGEKLEEWQIYKALHSAIQRRGYDPEIPWKHRAEQKKDDDSKTEKQATEYEKKLINITGGREDRIYPCYFDAWKMGLWNPETDKLEFKQKNTADRARKNVAPRKLVEKEIRALVRAASKEYHFFKDKEDYILYGKPKEAYASFFHELRLKYGLREGSDEDQKALLGQKIPRFDNRVVNKCVLIPRNNVCRADDYAVIQFTFLMKLMNLRFYDTTNHERRLLPEDIRKILEEKKEKADKERELMKSEKEQKREIAIKTAKIFSFTITDLKKWLKKNGKNWTPQVFNKKEKPVEPPKTGGRSRFCRPAIKQMRELILSGKSPGKFYTEQLELITNNDPQKGIVWKDIEFLLKLPDSWGKIYIPQRTIAEQYSENAETPDEAIKNLISAEINPVIRHRLGVFDKTLSRLAETHGTPDRVVLEFVREDFLGKDAKSALLKSQQKNRKAREEARQRAKEINATGKDAFTKLRLLKEQKCHCIYTDEALSESDLDLLVIDHIVPRSSKYDGADALWNKVVTTYITNDEKKDRTPYEFLSNTGGWQAYCERVKKSGLSNRKKRLLSSENPEEFNEKYTNLAETAWIARLARKIVCLKFGWQYGEKDVKEKVPVVHGGLTWAIRGKYDLNSLLFDVKDKTPDVIEKKNRDDKRHHALDAMVVSFLTGHEHEKKLPDGVARPLFEKHIKDVLPEPIATEKPVLEETIYGKREFGGKTVAVKRIELVSIGMSGKTFNVRKARNDAENILDDSIRKHILQFLETVPDKDTFLEFCKTVRQSGNKGSIVRKVTVSKGDIAEYKDLGKNVGKGQYRRGAKHRGQFIYRNTQGKVKVRPVYVFESKKDIEDELRESGYETLAFVQAGCRFEINKGVTVGERLIPPGKYIFNTIKTKSGQVVIDGDFPSPRIGKLIEAGFRRLK

SEQ ID NO: 872 - protein, 1319 aa, Weissella halotolerans
MAYSVGLDIGVGSVGFAGIDNQYNLVRTKGKNVIGVRLFDEADSAAERRGHRTNRRRLQRRRWRLRLLDDIFAKPLQAVDPNFLARLKYSYVNKKDQGQQDHYYGGYVFGSTAADQAYHQAYPTIYHLRKRLMEDDQKHDLREVYLAIHHIVKYRGNFLNPQSSLDIDQQFDVTDFAQALARFADHQALSWALEAPIRFLEAELATGLSNSARVDAAIEAFSFDTKVDRAAIKEMLKGLSGNQIDFTKLFVNVDSADWDQEERKQWKMKLSEEDFDEQALPILERLSQDETEFFLAIKRAYDGIALMRFLGDEQSLSSAMIKAYEDHRRDLTFLKTQVRTPQNRQALSEGYTNYLSVDDKKHKRGAKELAQLIEASDASEQDKATMLDRIANDQFAPKQRTKANGLIPYQLHLAELKKILAKQGQYYPFLLDTFAKQGQSVNKIEELVQFRVPYYVGPMVPKSETAGNAENHWVEKNDGQTKVSVTPWNFDQVFNRDRAAKSFIDRLTGTDTYLIGEPTLPRHSLTYETFTVLNELNNIRIDGKRLPVETKQAIVEDLFKKYRLVTKKRLQDYFASFGKREVELTGLADESRFTSSLTSYHDLQGLLGTDFITNPQNHSLLEKIVEIQTVFEDSDIAERELGKLGLEQKLIPRLAKKHYTGWGNLSRKLLDTSFIHDPERPEEPVSIMDLLYTTNKNFMEILHDSEYGVEEWLKSQNMIDDQKDIQMRIDELTTSPANKRGIKQAFNVLDDITQAMGEEPAYVYLEFAREKQASRRTVSRKKRLETLYKNAALKTEFKAIKEALAEESDDRMQDDRLYLYYAQLGRDMYTGQSISIDQLSSHYDIDHIVPRAFIKDDSLENKVLVNRTDNARKTDSATFTADVKAKAFPLWQQLKKLGLISAKKFRLLTRTGDFTEMERERFIARQLVETRQIIKNVAALIEGHFSQTQAVAIRAEVTGELRQLTQIKKDRDINDYHHAQDALLVATAGTYLHRHFPKRDARFIYNEFDYYTQHWLKNQGENRRRHPYSFVVGTMSKGNEDWTPDNLNYLRKVMQYKTMLMTRKPVGPEGALYKETLIAADPKKRLVGASKERQDPTIYGGYTKESSAYMSLVRAGGKNQLVKIPVRIANEIHSGQRKLDDYVQAKVKKFERILLPKISLGQLVEDEGQRFYLATNEMKHNAKQLWLDQKVVTTYKRLTAESPVEDFLTVFDALTSSATIHHFKFYQRDLELLRDNRAGFQDLAKATQLKVLKDVLYELHDNAGWRDPIKQYFKEIGLKVRMWTKLQKEGGIKLTDQAELIYQSPSGLFEKRRRVQDLL

SEQ ID NO: 873 - protein, 1385 aa, Lachnospiraceae bacterium
MAEKYYVGLDLGTNSIGWAVTDERYRILRKKGKDMWGARLFNEAESAAGRRTARVARRRLERQKARVGYLKKVFAPYLSEVDPGFLQRLEDSRFFEEDKTEKQKYALFSDKDYTDRDYLKKYPTIFHLRSELLESKEPHDIRLVFLAVLNIFIHRGHFLNQGLKEGTLGDIREWMKVLDENLEMLYQDRDWHMAVNIEEQQRILSSKELTATAKLEKLLSTVGIEKKDKDNKPLIEIYKLICGLKGTLAVAFDGEITDEENLKFSVSFRDSAYEENERKAEDLLGETAFETFKVLKEIHDWGVLSSIMKGDEKTYSYISLAKVDMYEKHKKDLKVLKKVIKTYKADDYNRLFRSMEDNTYSAYVGSVNYKNRKIRRGAKSDAFIPGIKKIVEEIYKSNPDSDCEYILNEISKDNFLPKLLTTANGVIPNQLYAAELRKILDNASEYLPFLNEISEDKKGLSIKEQLIALFKFQIPYYVGPLKRSESGKAWVVRKNDGTVYPWNIDDMVDMPATSEEFIKNLINDCTYIEGEKVLPRNSLLFEKYKVLNELNNLKVNEQKISVELKQDIFINLFRKNGKKVTNKSLLSFLKSRGIIEAKATDDCLSGYDKELGGFTGTLSNYEKFKQIFDTEVLTDRQIEIAEDVIYYSTVYGDSRSYLKTILSDKYGDVFDKKQLDRLIGIKFKDWATVSKEFLQLQAPEKMNGEVVTIISALWNTNMNLMQIINAPEYGFADELSEKRKKLSKTLTEITYEDIEDSYMNAPVRRMVWQTIRILQEIVGIMGSEPEKVFVEMARYEGQKGRKGRKDSRKKKLMALYKKCEDDEKNLVTEIERRDEKDFRIKKLYLYYLQRCKCMYSGRPIDPEKLLDDNYYDIDHIYPRHYVKDDSLENNLVLVESKYNRDKSDDLLGEDIRMKMKDEWKDLLDRGFINNTKYARLMRREAFTDEEFATFIERQMVETGQGTREVTRILGEALGNTGENHKVIFVKAGLVSQFRKYNADAGCPAFVKSRIINDHHHAKDAYLNIVVGNVYYTKFTMNPINYIKELRNKKNPTKNDNYHMDIEKLFDRLTERNGYVAWNPDEDRIVVRKMMEKNSPIITKRTYMNHGPISKLNPISPKEFGKAGGKSYLPLKTSDQRLINTERYGGYSDVKGAYFFLVEHTVKKKRIRTIEPVYVYMTEKMSGKEHLEEYCREQLGYTDPDVRLEKILMNSLLKVNGFNLYLTARTGNSLAVCNAEQLTLDMAKAAYTKTIAKAIEEKASEEYLRKMHGKSAAVITCENNLELYEALCDKHNKGIYSIKPTSIGAVIEKGKESFKVLDLVDQVYVLNQILIATQLLNNGVDLSLIGGSSSVGKTRINKNITGNREIKLIDQSVTGLYEREIDLLTI

SEQ ID NO: 874 - protein, 1390 aa, Gemella cuniculi
MESKKWYLGLDIGTASVGWAATDTEYKLLRKNRKRLWGVRLFEEATTAAERRGLRAGRRRLARRKWRLNLLEELFAEEVVKVDKNFFLRLRESKYHFEDKTNKETFTLFNDKKYTDKDFYKEYKTIYHLRKELMTEKNPDIRKVYLAVHHIIKNRGHFLLQGQSFKDGNIDNFIKELLNLEFVKVGFEITDEEIEKIKYISLQKKNLSAKVDDLKKLYPKEKQLHEIFKLIFGGKPTLDKLFNIAEYKELDSDIKSISFKNKIYEEERPKYEDVLSNYIELLDLAKQIYDGIILSDIKKVGQTISESKVESYEKHSEDLDKLKSLIVNDAELSDEKKKEIYYAIFKEDKDKGTNYVNYTLRSREGKGCSYEDFKKFLEKELDKLESSEIKENIIKELKLEEFLPLQRTKDNSVVPYQVHKEELVKILDNATKYYDFFNKKDENGFTVKEKIIQLLEFRIPYYVGPLNSYHQAKENGFAWSVRYDNEENTAVTPWNFERVIDADASAEKFIRNLTNKCTYLKNEDVLPKHSLLYSEYELLNDLNKLRYDGNRLTVEARDAMVENLFKKQGKKVSAKVIEDFLKVNGFTDGRGKISGIDVTIKSDLKSYRDFKNILGEKFDTERVENIINWITLYGESKKLIINKINKVYGDYYTTEEIKKISRLTYKGWGRFSRKLLTEIVSEKFFNEETGECLNIINALRQNTMLLMEILANQYGYMEQIKDYNKRLQKEIFEITPDLLDDLYVSPAVKRSIWQTIRIVEELKKIIGSTPEKIFIETTRTNQAEKKRTNSRKDYLASLYKNIKDKEILELEKSLGTSLDFDKNKSKLMSVEPSELKAKKLYLYYMQLGRCMYSGERILLSELFDNNKYDIDHIYPQSKVKDDSFTNTVLVKREINEEKGNNYPLEKSIQDENKNFWLFLKNKDLISDEKYNRLVRTKDFSDDELTGFIARQLVETSQSVKAVANILQELNQKSVICYSKAENVSEFRENFGKIKSNNLESQSKEKLIKVREINDLHHAKDAYLNIVVGNVYDVKFTRNAYNFITKEKNGRQYSLNKIFYRNVKNSKTIAWEVDKTINTVESVMNNNSILVTRRTSEQKGGLYNENISKAKKSKDDSYYPQKTSDKRLIDVAKYGGFPKIKIAYYSIFECITKNKKGEEKITRIIPIPIYISQNIKNDSALTDYAKSQIKAKYAEEIKDLKLKYRKLCIGGLCKLNNFSYYVGGKTSEYFNFDSAIQVILDNNSEKYIKEIVKYLNWKKDNKDGELWKIITSEKNIKLYNTLVKKMNSNTLKNKKLNNYNELKSGKVFFKFKNLNKEEQITVLLELLYVLTEKKTTFNLKLINLTATRAKNRFDLTNLNQFSIIEKSITGFYEKEITIIGEKNNDMENNSN

SEQ ID NO: 875 - protein, 1355 aa, Helcococcus sueciensis
MVKKDYYIGLDIGTSTIGWAVTDEEYNLMRSKGKDLWGVRFFQEAQTAADRRVHKSNRRRLMRRNSRLQILREIFEDEISKVDPEFYERMDESKYWVEDKKVSGKYSLFNDKNYTDKDYFKEYPTIFHLRKSLIKHEKKADIRLYFLAINQIMKRRGHFLIDGKLNNVTDIEPLKLQFISILNDKYIEEIDENFIDEAFDIISDINEKKTNKKNQIKQLLNRYSFSKDESKVLKNIFELIISGKGKVKNIIDDENIAEKLKDDKKEDFLLSGEAYEENLDYFESVLSEDILLFTTIKSVYDFTLLQDILRGSEFLSFAQVERYNEHKKYLEKLKLVIKRYDNTKERKLYNEIFKSIDNPKGYVAYLGHHEKNGKKTVVKKITNQEFADYIKKMLKENTDLNDNDVKDILNKIEKDEFLLKQISSKNSVIPYQIHQFELERILDNLVKDYPSFNEIEEGFTKRDKISKTFSFRIPYYVGPLNDYHKNNGGNAWIFRNNDEKIKPWNFEQVVNLHKSEDEFIRRMLNKCTYLPSETVLPKSSLLYSEYMVLNELNKLKIGDSYLSVDVKADILENLYRKDPRVSLKKIREYLIRTNKAEPNDFQKGETNQEIKSNLKSYIDFTNILKDKFDYEMVEDLIEKITIHTGNKKLLTKYIKDTYSNLTAYEIKEITSLKYKDWGRLSRKLLVGIKETNLETNRQDSIINFMRLTNDNFMQIVEGPKYTFKGYIEKERLSGLSDNLDYDVIDSLYVSPSVKKMIWQVLKLTEELVKVQGYKPKKIFIEMARSDEEKKETVSRKNRLLELYKAIKNDKESLIADYEYDKLIKGIQSTEESDFRSKVLFLYYSQLGKDMYTGENIDLNHMFDKTIYDIDHIIPRRMKKDDSITTNLVLVNKKSNQDQKKDIYPVPSTIRNNPKVYNLWKLLVDKEFITKEKYNRLIRKDELTNEELAGFISRQLVETRQSTKVVKELFEKYYSDIKIITVKAGIVSELRHDFNVLKSREANDLHHAHDAFLNIIAGDVWNKKYTSNPLNFVKENRKSKQVNYSLNHIFEKQQKVRDKIIWEPDKGKELIIKTLNKPSVLTSSEAFEQKGALYNATIIGKKDFKKNTKYLPLKKDERLSDISKYGGYSSLTGAYFYLVEHTVKGKRIKTIEFVPLHLSNEIKEDKDKLLKYSTDELGLINPEIIIKKIKYKTEIEVNGFRYLISGRTGNQIILEPNMQSFWNIEELNILKTLQNKYEKGMFSNTDKIEENDIFNMKLILNKLIQKLSSLPYINRINMPVIDKSKIDDVKVSELFIIINNLLILLNKTVMASDLSLIGLAKASGRTLLSKNIEKYNSFMIIQKSISGIYEKKIRII

SEQ ID NO: 876 - protein, 1062 aa, Thermithiobacillus tepidarius
MQAPSKAEYTLGLDIGMASVGAALLTNDRILALHVRAFDKAETAKEGESLNAIRRAARLTRRRLRRRAHRLLRLRRLFKGMGLLDSQDPAALFTGKSPWVLRSEGLDRRLTSPEWAAVLYHIVKHRGFHSSRKSEAKADEQIGQMLSGVNRIKELLANTGLRTVGELAAKHEAFAEAKRNKGGAYTHTFARADLAAELSLLFAAQRRFGNRHADATFESAVRDLLMARRPALSGERLLKMVGKCTFEPTEFRAPKASHSAERFVWLTRLNNLRVSGLGETRPLTDSERATLMELPFAQAKLTYKQARKLLGLAEHERFAGLDYRDKDPENATLFEAKAFHALRKSYEEAGLKALWQRDALDPERLNTLAHAQTVFKEDGEARAWLAGQGVEPEIIEAVLNVAFSDFVRLSVKALRRIIPHMETGLRYDEAVRAAGYVHHSQLPGSKRALTIPRISKDDFPNPVVYRALNQARKLVNAIVREYGPPVRVHIELARDLSKSFDERKRIEREQKSFRENKQKDIADFVERFGVTPKGADLVKWRLYREQNAQCAYSQKAFDLDRLFEDGYAEIDHILPYSRSFDDGMSNKVLVHTAENRNKGNQTPYEYLDGQSDSERWRRFVAWIMGNKAYRQAKRQRLLRKDFGEAAAREFRERHLTDTRYIARSFKRLVERHLQLAGDTSNTRCMILSGQLTAFLRARWGLLKVRENGDLHHALDAAVVAACSQAMVKRLSDYSRRGELEQVRKGYIDPETGEVLDLAALRRLEAQFPTPWSHFRDELLAWLSADPATRLARLPNYPAKQAQRARPVRVSRAPTRRGTGQAHQETIRSAKRLGNGVSTVKTPLQNLKLKDIEKIAGFDDPRNATLLEAIRQRLEQHGDDGKKAFKEPLYKPGKPAPVIRSVKLMETQKSGLAVRGGVANNGNMLRVDIFTDGKRFHAVPLYVADAIKAELPKRAVVAYKPEAEWTVMDDKYAFLFSLHPNDWVVVTLKGAGQPLAGYFAGLDRSTGAISLWTHDRNQTVAKDGLIRGIGIKTALAIEKFHVDMLGRLHRVRQETRQRLRRAG

SEQ ID NO: 877 - protein, 1100 aa, Butyrivibrio sp.
MGYTIGLDLGVASLGWAVVNDEYEVLESCSNIFPAAESANNVERRGFRQGRRLSRRRRTRISDFRKLWEKSGFEVPSNELNEVLQYRIKGMNDKLSEDELYHVLLNSLKHRGISYLDDADDENASGDYAASIAYNENQLKTKLPCEIQWERYKKYGAYRGNITIQEGGEPLTLRNVFTTSAYEKEIQKLLDVQSMSNEKVTKKFIDEYLKIFSRKREYYIGPGNKKSRTDYGVYTTQKNEDGTYHTEQNLFDKLIGKCSVYPDERRAAGATYTAQEFNLLNDLNNLVIDGRKLDEQEKCQIVDAVKHAKTVNMKNIIAKVIGTKANSMNMTGARIDKNEKEIFHSFEAYNKLRKALEEIDFDIETLSTDELDAIGEVLTLNTDRKSIQNGLQEKRIVVPDEVRDVLIATRKRNGSLFSKWQSFGIRIMKELIPELYAQPKNQMQLLTDMGVFKTKDERFVEYDKIPSDLITEEIYNPVVAKTVRITVRVLNALIKKYGYPDRVVIEMPRDKNSEEEKKRIADFQKNNENELGGIIKKVKSEYGIEITDADFKNHSKLGLKLRLWNEQNETCPYSGKHIKIDDLLNNPNMFEVDHIIPLSISFDDSRANKVLVYAAENQNKGNRTPMAYLSNVNREWDFHEYMSFVLSNYKGTIYGKKRDNLLFSEDIYKIDVLQGFISRNINDTRYASKVILNSLQSFFGSKECDTKVKVVRGTFTHQMRMNLKIEKNREESYVHHAVDAMLIAFSQMGYDAYHKLTEKYIDYEHGEFVDQKGYEKLIENDVAYRETTYQNKWMTIKKNIEIAAEKNKYWYQVNRKSNRGLCNQTIYGTRNLDGKTVKISKLDIRTDDGIKKFKGIVEKGKLERFLMYRNDPKTFEWLLQIYKDYSDSKNPFVQYESETGDVIKKVSKTNNGPKVCELRYEDGEVGSCIDISHKYGYKKGSKKVILDSLNPYRMDVYYNTKDNRYYFVGVKYSDIKCQGDSYVIDEDKYAAALVQEKIVPEGKGRSDLTELGYEFKLSFYKNEIIEYEKDGEIYVERFLSRTMPKVSNYIETKPLEAAKFEKRNLVGLAKTSRIRKIRVDILGNRYLNSMENFDFVVGHK

SEQ ID NO: 878 - protein, 1350 aa, Butyrivibrio hungatei
MANVKYYLGLDMGTNSVGWAVTDENYKILRAKGKDMWGMREFDEAKPADERRTNRISRRRTMRSKARIGLLNNYFEDEIAKIDPSFLQRLANSKYHLEDKDEAVRYKYAIFNDKNYTDKDYFKEYPTIFHLRSELIHNESPHDVRLIYLAVLNMFKHRGHFLANGIDTTNDVRGIEDAYYGFVSNANEICELNFPEENVDLNKFKTILADRKLSRSQKVDELSELLAIGKKEKDFVKAICGLKFDINKIFELGIEDKSVKTSFAFSDSNYDENESEILGLAGDDYSDIILSLKELYNIGTLEVIMRGSSYLSDARIKDYEQHHEDLKILKRVVKTYCPKEYHKMFRSEDSGTYAAYVNSTNSGKKTRRNYKSRTTEELYKSIKAILKSAPADDEDVIYITEHIERENFLPKQLTPSNGVIPNQVHEREMRKILDNAGKYLPFLTQKGESGNTIADEILAIFTFTIPYFVGPTSESSKKYGGNGWVIRKEEGKILPWNINDKIDMDKTNEAFIEKMVRRCTYISGEIVLPKSSLLYEKYCVLNEINNMRIDGERINSELKQDIYTELYEKGSKVTRKKLENYLVSRGIITDKMQISGIDENLNNYLSSYGKMKGVFGEHIKEDKCRDMCENIIFLATIYGDNRKYLRGRLMKEFPELSDEQIKRILGLKFSDWSRLSKEFLLLRACDKSTGEEISLIDAMWNSTHNMIELINSDDYTFRDELENLQKSSMGVLSDFKFEDLDAYYFSAPVKRMVWQAIKIVKEIEGIMGCAPAKLFVEMTRSEGEKKRTVSRKNKFLDLYKSIKDESHDWNDIITKADEDGTLRSKKMYLYLTQQGRCMYTGRHIELDKLFDNNLYDIDHIYPRHFVKDDNIENNLVLVEKEKNAHKSDVYPIEEAIFKSQIGMWKELCNKGFISKTKYSRLISRQPLTDEQKAGFIARQLVETSQATKGVNTILKELLKENTTIVYSKASNVSEFRQKYEIPKSRLVNDFHHANDAYLNIVVGNVYFTKFTQNPIRFIKNEYNKDPDKFNYHLTNMYAHNVERNGETAWVASSDDTKGTISTVKKQLSKNTPILTRMTFENHGGITRKQTIWSSKITKQDVYFPVKSSDKRMADVTKYGGMSDIATAYFFLVEHDVKKKRVRTLETVPVYLSKRIEKDSSLLEQYCMQNLKLVNPDIRVRKINIQSLIKKDGYYLNISGTTGNRITVRNAVGMCLGQKWNGYIKKIEKYVAQEIADDVLTIEKNNELYDEILSKHKNTIFANKPNPSFETIEKGKEKFLHLDLYGQINALYQVLSLTAIGFGRADLTLIGGSKTSGLMLMPSLISGFKELVLIEQSVTGLYERCIDLLTV

SEQ ID NO: 879 - protein, 1356 aa, Butyrivibrio sp.
MKKDSNYFVGLDMGTSTVGFAVTDENYNLIRMKGKDFWGIREFDEAQTAAGRRQKRTSRRRRQREIARIGLLKEYFHEAISKEDENFFIRLDNSRFFEEDKDSILSSQNGIFNDVDYKDKDYFAQFPTIFHLRAALIEDSVVADNKYSRLVYLALLNMFKHRGHFLGGEISDSGDASIEKIYADFVNISNALVGVSFPENAHGIVTEILADSSISRTEKAARMFEALGFLKKNKIENVIVKGLCGLKIDATKIFEELSEENKIDIDFSDSSYIDREQEICSAIGEEKYELIDLMKQIYDFGILSKLLQGKRYLSQARVDSYEKHKNDLKILKQVYKTELSVEQYDQMFRFIDKGSYSAYVNSTNSSGVIKENEGLCRRSFLGKGRSREELYSKIKKDLKNCSSKEALYVLHEIENESFLPKQLTSDNGVIPNGLHKIEMEAILRNAEKHLPFLLEKDEYGNTVSQRILKLFHFHMPYYIGPVSEYSKTGWVIRKKAGQVLPWNLEEKIDIDKTRVRFIDNLVRRCTYLAGESVLPKASLLYEKYCVLNEINNLRIGGEKISVNLKQDIYNDLFKKGNRLTRKKIAKYLINRGLLDEEDKLTGVDININNSLASYGKFYKIFGEDLEKDSVKENVEKIIYYATIFGDSKKDLEKLLKKDFGDILDSEAIKKICSYKFKDWGRISKEMLELEGCEKGTGEAYTIIQAMWSTNNNFMELVFGENYTFRDELEAKQVKLQKELNSFAPEDLDDYYFSAPVKRMIWQTVLVLKEIRKLMGHDPSRIFIEMTRADGEKGKRTQSRGKQLIELYKNIKNEERDWISEIDKADKDGSLRSKKLYLYYTQRGRCMYTGEPIDLSELFDKNKYDIDHIYPRHFVKDDSLMNNLVLVNKTKNARKSDTYPIERLSDSVYHLWNSLHSQNLITDEKYRRLTCRNPFTDEQKAGFIARQLVETSQGTKAVADLIKQLFSEKTTVVYSKAGNVSDFRNENQLLKSRAINDFHHAKDAYLNIVVGNVYYTKFTLHPMNFIKNELSKDEKKYHYNLDKMFKYDVERNGYVAWRALKEGEKNPTINVVKKVMAKNTPLITRWTFEAKGAIANETLYPAKKAKEDGYIPFKTSDVRLAEVSKYGGFTSVSGAYFFVVEHDDKKKRIRTIESVPIYLKEKIEASENGLLDYCIETLKYKNPRICVPKIRTQSLLEINGFRCRITGRTGKQLYLKSEISLCLDMDWNNYIHDLEKYDNSGIFNKTITKDKNIELYDVLLKKHVNGIYKSRMNAIGGKLESGRDKFIELELDGQCRVLLQMIKISNSEKSANLVDIGASPSTGVMLINKVLKNDCSIYLINQSVTGIYEEKVDLLKV

SEQ ID NO: 880 - protein, 1369 aa, Lactobacillus rennini
MDKPYNIGLDIGSHSIGWTVVDDNSKLVRIKGKLGYGVRLFDEGKTAEERRQFRTTRRRLKRRKWRLRLLREIFEPHIAPLDETFFLRQKQSNLVPTQKKLPQLSLFNDRSDAEFYHKYPTIYHLRNALMTEKRQFDLREIYLAIHHIVKYRGHFLNAAPAASFKSGKFDLENKFDQLNLLFASAYSDLDFTLRTDNVDQVKAILLNEDLSASTRQRQALPLIYQTSADQKAAKKLTKSLATELLKAILGLKAKFDVLTGIETDDTKAWRLTFNAEDFDDKLNELNVTDNEAATQIIEILRELYSSILLAAIVPENYTLSQAMMAKYNAHKQHLSLLRQVKTTLPAKKQKELQAAYDDYIDQHLPLDKFYAKLTKVLPKEKDTDNPQIIQILNLIDLDQFLPKQRTKDNGAIPHQLHQQELDQIIDNQKAYYPWLAQLNPNEKRQKIAKYKLDELVAFRVPYYVGPLIEAKTQQKTSGANFAWMIRKEPGTTTPITPWNFDEKVNRQASANEFIKRMTTTDTYLLGEDVLPKHSLLYQRFEVLNELNGIKIDQKRVTVRQKQAIFNDLFLKQPNVTVKKLQQYLQAKGEYASAPIITGLSDPKKFNSQLSTYHEYKKIFGGLIDDPDKQADFEKCIEWSTIFEDSQILKDKLKEINWLTPEQRHKVANKRYQGWGRLSKKLLTQLVDYNGQRIIDILWNTTDNFMQIVHSEAFDKAIIKENQALLTQYNPQAVIDDLYTSPQNKKALRQILLVVNDIQKALKGQAPSRILIEFAREGQENPRLSTQRKQQVENAYKEASDALLSSAEVRQELKGLDNKALANTRLFLYFMQGGRDIYTGKSLNIDDLSKYDIDHILPQAFIKDNSLDNRVLVSAKMNRSKSDQVPLNDFAEIRYGKQMRQQWEKMLRAGLITRKKYHNLTLNPESINKYTAKGFINRQLVETRQVTKLATNLLVDQYAEDDVQLITVKSNLTHQMREEFDFPKNRNVNNHHHAFDAYLTAFVGLYLLKRYPKLAPYFVYGDYQKGASQNSKWRNFNFLGNLHREKVVDKNTGEIIWQRDAGLGELNRIYNFKKILVTRALRVNRGPMFKQTIYKAEEDKSSGRGSKQLIPTKKNRPTELYGGYTNKETAYLCLVKEPHKKGDIYRICSVLNMWLTELDRIADPIAKAQKLTELLTPQFTTTKKKQGQKIPVVKPFKVVIPKILINQRFFSRGQELTVASPMYMHNEQELFLNKKTIKLLNGQLAKNEAHELAPKIYQQILDQVNDYFPLYDMYKFRDTLNASKEIFVNLPWQDQRQDKKISQSGQKSILNKILIGLHANAARIKLTELNFKSDFGLLSQRSGIAFSPDDQIIYQSPTGLFERRVTLKDL

SEQ ID NO: 881 - protein, 1352 aa, Lactobacillus agilis
MSEKEYHLGLDIGTNSIGYAVMDCNYHLMRAKGKTLIGTSLFREGNTAAERRGYRTTQRRLKRRKRRLKLLEAFFDPYIFEVDENFLARLHEADISPKDENKRFWGSLLFPNEKDANFYRKYPTIYHLRKALMEEDRKFDVRAIFLAIHHIMKYRGNFLSPLSVDSFKQEGLELKEQLDRQLKRVAELYNELNTDVKINVSDVETIQDIIIDKNKSRRDKAGALKKLLAVSSDRKEINKLNASLAKELSNAILGMKAQFANLLLADDLEIDKNKKNFSLLDTNAEENVSGLLELVNEKQAELFDAIKTIHDQIILNEIVPDGKSISQSMVDKYEAHREQLQVLKALYEKMDAKQIKAIKKAYSLYIDGKDPKAKKVDKRAHQNRADFYKEVKKVLVELDDSRAEKLLGLIEMGQFLPKQRTAMNGVIPNQLHQVELDKIIEMQSKYYPWLAEKNPVKSHQKRAPYKLDELLTFRVPYYVGPMVTSKKQQQTSNSNFAWMVRKQEGEITPWNFEEKVDTIASANDFIKRMTAKDTYLVGEDVLPANSLLYQRYKVLNELNNIKVNGRRLPVELKREAYVALFENGDSKTVSAKCFKNWLNVKLKNLNSLKLEGLSTGTKFDNNLSTYHDLKKIFGKAVDDAGRQKDFEQIIEWLTIFEDKKILRIKLKEIEWLTEENITQLTRLNYNGWGRLSRRLLTGICDSNGQRIMDWLWDTTNNFMQIQSQPDFQKAIVEYNSDKLEQGDIEQILGEAYTSPQNKKAIRKVIKVVQDVEKAMGAKPTSISIEFTRSDGRSELTNSRMTQLQKTLMSLSEEMTDQALLAEFKDFQASKKKLTNKYYLYFTQLGRDMYTGEPLNIDQLSLYSDGDHILPRSFIKDDSLDNRVLTKRAVNNEKSDTVPVCEYGAKMKDFWNDLYDNGLISKQKLANLLTDPDEIGPYKANGFIRRQLVETSQVIKLSAEILQTLYQDTKIIEVRQKYTHELREHFNFVKIRQLNDYHHAFDAYLTAFSGRYLYQRYPKLRGYFVYGDYNKFDAKKDRNYLKSYNFLYDLEEGKTDQIVDNVEHKVFMNRQDAINQLKKAYEYKYMLVSQETYTNSGAMFKETIYPVNPKQKLIQKKNDKPVDIYGGYSNNYDAYLSIVRLEDKKGIKFRVVGIPMRNKAELDNLAKEDHNGYMQRLNEIVDEQINSSGKKKTFRIILPKVHFKQLVEDDSGKFMLGSAAYPYNAKQLVLSVKSIESLANKDASDRELVAVYEEILNVVNDKFTLYDARQFRNKLTSSKDKFVELNTADKVTELLDILDGLHANPVVKKLKIISGSPFGFLQRPSGIVLTENAKLIYQSPTGIFERVVYLRDL

SEQ ID NO: 882 - protein, 1078 aa, Lactobacillus ozensis
MHKHYKYALGLDVGVGSVGYALLKLDEADQPCGLLKANSVTFPMSQDRTGNTLASIARNYRSGRRLNRRRKLRKQLVSNLFTKNGLINRNDVYSPYTKHPNFDLYRIWHDSFNQQISNQDLYRLLYYFAGHRAFKSNRIHQLKSSGDKDTTKLLSSIDTNKEYFNNSQYNHLGEMFYCDPKFAQRKHNKGYDDGYLFNIDRGTLLSEIKEILNAQSKFGNPAINDDFKARYLKILSQQRNFDVGPSNPSRFALVDSSGNIKLRNKKDKLNLSFKTSAKASYTFQKFQILQKLANTRYKLNSQSKYQSLNAETIDKIFNKAITKANYKYSQLKKDLKLPDSARFNMVMYETSDDKSAKQAETKTFIIKDNTYYILSKILSDKLQHDYTVIDQIAEILTRYTSDEPKAKALKRQLGEKLSDEKIESLLALNFTQYGSYSIDTMQCLIPYLAKGYDVTTAIDAFNEDQASLENGHSPLIDASMNYHEIISSIKNPALLQSFTKTVKVVKALIRRYGNPYTIHIEMARELSLGNKGKAELIKKQNENRKRNDKVITEMKENFPNVSINGENIIRLKLYHEQNGIDIYDGRMIDYQHVLDNNYEVDHILPYSISFNNSFNNKVLTSSRNNQLKRNRTPYEWLHNDKVRWDTFTSIAENVRNYPKKNNLLKMHYDESDMKKWKTRSLNDTRYATRLLYNYFKHNEQYFDAKPSVMTMNGSMTAQLRYYWGIVKQRAASDKHHAVDACVIATCSNSMVNLISKYHTAREKEQLSSKFPMPWPDFRNDVMNAKQQMNVKRIFSHSIAGKVNEDGLKGARYINTDKVVVIHEKLANLKLKKVGDDYIIVGHGNSRYLRPDDLTSISNRNSKNDLNSVIYDHIYNALSKDKKAFEKQPYLEFEHKGHKYTVRRVKVISDYKGGVILNRDADGNPISVANRGKMVRNDIFKCLDKKERVVYRFVPIYEHQILDTHLPNQYAPFAKNIFVNDKDQFICSLSKGDAVEVKLSTPKKVENCDEPYVCDHFIGYFDGSDISSNRIKINALDNSCSIRASMSKLISIQKCDVTIFGSIHKVHEKVRQPFNLKHK

SEQ ID NO: 883 - protein, 1318 aa, Lactobacillus animalis; identical to SEQ ID NO: 164

SEQ ID NO: 884 - protein, 1368 aa, Lactobacillus graminis
MKRSYNIGLDIGTNSIGWAIVDDQSKLISVKGKYGYGVRLYDEGQTAAERRSFRTTRRRLKRRKWRLGLLREIFEPYITPIDSTFFLRQKQSNLSPKDQRKLYPQTSLFNDRPDADFYQQYPTIYHLRYQLMTEKRQFDIREIYLAMHHIVKYRGHFLNEAPVASFKSSEINLAEHFDQLNTIFADLFRESGFQLETDELVAVKALLMDNQQSASNRQRKALPKLYTPSADKSIEKQRKAIATEILKAILGLKAKFNVVTGIEAEDVKAWALTFNAENFDEELAKLESSLDDNGHEVIGILQELYSGILLAGIVPENQSLSQAMITKYEEHQAHLKMLKAVRDDLATADQQKLKKAYDQYIDGQENTKAYSKEAFYDDVTKALKDYSEQPLVSEIQKLIELDQFMPKQRTKDNGAIPHQLHQQELDRIIENQQQYYPWLAELNPNPKRQTVAKYKLDELVAFRVPYYVGPLITAEQQQQSSNAKFAWMIRKTEGRITPWNFDDKVDRQASANEFIKRMTTTDTYLLAEDVLPKQSLIYQRFEVLNELNGLKIDDQPITNELKQAIFNDLFMQKTSVSVKNIQDYLVSEKRYASRPAITGLSDEKKFNSRLSTYHDLKVIVGDAVDDVDKQADLEKCIEWSTIFEDGKIYSAKLNEITWLTEQQRGQLATKRYRGWGRLSAKLLTQIVNANGQRIMDLLWDTTDNFMRIVHFEDFDKLITEANQMVLAENDVQDVINDLYTSPQNKKALRQILLVVNDIQKAMKGQAPERILIEFARGAQKDKSLTVRRKRKLDEMYSQISDAVLADESVRQELKSSNQDDLVKEKVYLYFMQGGRDLYTGNALNIDRLSDYHVDHIIPQAYIKDDSLDNKALVSSRMNEIKADRVPLQVVQKQFGKNMASEWGYMHRAGLISRKKYDNLMFNPENLNKYQINRFISRQLVETQQVIKLVANLLSNQYEGDNVKIITVKSKLTQTIRSEFDFPKNREVNNYHHAFDAYLTAFVGMYLLKRYPKLSSYFTYGEYLKGNQQDKWSSFNFLNDLKRAKLEDKTNKEIFWHKESGLAYLNKIYQFKKILVTREVHENSGALFNQTLYAAKDDKASGQGGKQLIPAKQARPTALYGGYSGKTVAYMCIVRIKNKKGDLYKVCGVETSWLAQLKQLKDEDSQKAFLKQKISPQFTKAKKQKGTIVKVVEDFEVIAPHILINQRLFDNGQELTLGSATYKHNEQELILDKTAVKLLNGELPLAQSEELAELVYDEILDQVMHYFPLYDTNQFRAKLLAGKTAFMQLPWKSNPDDNKTVQITQPIVLKKILQGLHADAGRVSLKELGMTTDFGMLQKATGITFTPDTQIIYQSPTGLFERRVALRDL

SEQ ID NO: 885 - protein, 1171 aa, Lactobacillus cacaonum
MAKYSVGLDIGISSVGWAIIDIETKQIVNLGSRIFPSGNAAGNQERRGFRGIRRLIRRRKNRLTDLKKLLGETFFSDLKKIDSNGYEYYDIDFQINANPYELRVKGITEKLSKKELAVVLHHIIKHRGISYDLGDLEDDGTSGVSDYKNSININRQLLREKTVGQIQLERLIEFNQVHGQVKKAEDVSLLNVFPSSAYRDEANKIMIKQQEFYSEITNSFMEQVDQLVSRKRDYFIGPGNEKSRTDYGIYKSDGRTLDNLFAELIGTDKINGEKRASASSLTAQVYNLLNDLNNLHVSNTEDGKLTTSTKKEIIKAAKTTDGVFGISQICKIIGCKKEEITGFRQDKSEKKVIHTLAGYRKIRKALATINIEANELNPTVFDQIADILTLNTEKAEIRKQLDKVQLDITDEMKELVIDKNKDFLVDGRATWHSFSYQTLNMLIPELLNTSEEQMTILTRMGLMKSDNEKYRGLKKIPAEKIASEIFNPVVAKSTREAIKVFNAISKEIGKNNIEHVVIELPRDDNEEDEKRKIQKLQKANETEKEAADNLVKHKLGISDSALIAHYRKFKGLSQKVRYWYQQETYCPYCGKIIEATQLINNNDNFEVDHIIPISVSYDDSQNNKVLVHSQCNQAKEKQTPLGWINNGGGFGQSKNEYTNRVKNNKKYSKNKVDNLLNETDLTDIITQRSFIQRNLNDTRYAARTVLDEFYSFFKSNDLPTKVKVVRGKWTSQMRRKWNNVGGLRKTRDTHHHHAIDASIIASFPLLRAFDRAIKLIDVDKETGEIVQYGKASLNGDVIEEKSVIQAPIIKNEKFEKLVDEIYNFPLFKQVELANNIENPENPVKFSHHVDKKANRTVANQTIYSTRIKKTEKIVRKKVTAKEEEYVIGTIKDIYDVTNFEKFKKLYDESSKKDDIKFLMQKNDPKTWEKLVEIMNTYPDYEEISQLDGKVKRVKVSPFKLYFRENGFITKYAKHNNGPKVVSIKYYDSKLGNHIDITPVNANNKVILQSLKPWRTDVYYNNETQQYELLGLKYSDLKFTKGVYGITREAYEKLKYGYTDGVPAWKPISKESEFKFSLYRNDRVRIINEAGEKIDLLFGSRNETSEGYVEMKPIFKTNFDDAEEASFYGKTSNKRLIKKMARKGYQIYKVNTDILGNLYYTAKESNEPKLDL

SEQ ID NO: 886 - protein, 1345 aa, Lactobacillus senmaizukei
MVEKYGIGLDIGTSTLGWTSVDENGKIQRLKGQTALGTRLFNEGQTAEERRGFRTTRRRIQRRRWRLRLLREIFDEPIGSVDAGFFARQKMSSLSPQDDRFEDTYRLFNNQTDKAFHDEYPTTYHLRQALMNSDRQFDIREIYLAIHHIVKYRGNFLRSGKPADFKTGKLDLKEKFEEINADWQTLISEDAPQLPVDDLTTIKAVLVDGSRSRSDRQRGLVKLWMANETVEKNWKPVMTELAKAILGLKTKLYLLTGLDLPKEDQKAWTFSLDTLEDHQGDIDSFFDDHAQQLIDRLAELRAMIQLTEIIPSGLNFSQSMVQRYEAHRSHLEMYKQYALDQTDPKRTKALRAAYNAYIDQHEIADDFYTAVKRVTKDDQSETAEEINRLIGLEQFMPKQRTKENGVIPYQVHQQELDQIIAHQKKYYPFLGTENPVIDHRESQPYMLDELVSFRVPYYVGPMVAANPELKTTENPFAWMIRKAQGEITPWNFDEKVDRKGSATAFIERMKTTDTYLLGEDVLPQQSLLYQRFMVLNELNNIRIDDELLTTNQKQWVFDRVFKGKGTISAKHLQDALKHHGETDGLPKISGLADPTKFNSALTSYRDFQKWLPNDIDRKDRTADIETIINWSTVFEDTHIFVEKLKEIEWLTADQRRRIASNRYRGWGRLSKHLLTEIKDEQGLSIMDQLWRTQHNFMQIVHEPDYAKQIEAANTVGMAKQDIGTVINDLYTSPQNKKAIRQVLAVVKDIQNAHHGVAPSWIFMEAARGADQNPQRSRQRQRQLQDLYAKTAADLVDTEVQQELTDKIKDKANFTDRLMLYFLQNGQDMYSKEKLNIDRLSEYDIDHILPQALIKDDSLDNRVLVHQSINRNKSDTFASEKYGAKMQGAWHQWRAAGLISARKLRNLEMRPDEISKYATGFIRRQLVETRQVIKLVTEILSHQYNPEETKLVSVKAGLSHELRREAGLPKLRDLNDYHHAIDAYLAARIGTYLLKRYPRLERFFVYGQFQTSRLDLRRFNFIHDLVKSKQGVIVDSDTGEILWDRQKDIDYIKHLMGLKHLLVTHEVYDSAAEMYAQTIFKASDNDSKVLIPTKNDRPTAIYGGYTKRRNGYLAILKITEKKAETYRVVGVPTLYMSQLATARSHSVEAEKALLKSLMAPEILSESKVVSFEVVVSHVHLNQLVRDTVFGPAHYFGLGPFRYVRNFHQLVLPFKDQEILVKRTPTDEELNTVFEDICWQVENYFAVFDINGFRNALKKSIDKFEQLPIENVFKDKKLVTQGKKEVLAFVMQGLHANASYRNLKVSLGIKTPLGQLQLTKFMLSRDAELIDESPTGLFRRIRRLKDL

SEQ ID NO: 887 - protein, 1320 aa, Lactobacillus florum
MTEQQRPYNIGLDIGTSSIGWAVTDQNDKLLHIRGHNGIGVRLFKEGESAAERRGFRTTRRRLSRRRWRLRFLDRIFDAELAKVDPNFLARLKQSNISPLDPNKQMFGNILFDDAQFDDQKFHQQYPTIYHLRSALAQPDAPQADVRLIYLALHHMIKFRGHFLNGAAVEKFHGGQLHLEAEFQELNQIFSNQQRDHVQLQTSSLDEVATILKDNQRTPSDRQRELSARLFVPVDKTIDKENKKLATELLKAVLGLKAKFDVILGVEATDPQAFKLQFSSDDFDDKIAELASELTDEANEILTVLQRLYFSLNLADILTNRQTKQVADSISTAMINRYDDHKHHLKMLKELETQVTQEQRDGLKKAYDEYIDGDKPTIDTFYTNVKKNLDDSELANQIKSLIDLQAFMPKQRSKENGSIPHQLHQRELDQLIEVQGKYYPWLLAAKDKLDALIAFRVPYYVGPMIDPNESDDPQNTKFAWMVRKEAGEITPWNFEEKVDKTGSATNFIKRMTTTDTYLLGEPVLPKNSLLYQQFTVLNELNKLKVDGKALTVDQKKYLYEHVCKKQRRVTLKKLSDCLMARGDFPMGAIFTGTTDQKNMNNTLKTYQDFQEIFGDEIDNPDRQVDFEKMIEWSTIFEDREIFKLKLAELNWLTSEQLERVSKKRYQGWGRLSQKLLTHIVNENGERIIDQLWNTNQNFMEIMGQDGVKQAIQEHNGANVAQTGINETIDELYTSPQNKKAIRQILLVVDDIKKAVGYAPANIMMEFAREDRDDHRLIASRARQLEKTYQEISKNWFDNESVTQELKDQIKNKTKFTDRLYLYFIQGGIDLYTGHPLNIDQLSSYDIDHILPQSFLLDNSLNNRVLTSQSENRVHKEDRLPGETVANKMRPTWKMMREQGLMTQRKYNNLTLKPDQISKFNNRGQFINRQLVETRQVIKLAADIMNQKYQADQTKVVTVKANLTHHMREKFNFYKSRNVNDYHHAFDAYLTVFVGNWLLKEYPKLQPYFVYGDFAKTGTNNLKSFNFLYRFERDHKLNDKGAIDTDKDQQLGYMKRIYRFKKMLVTKQLETNEGALYKQTIYKAPANEKNTKKNRSLINTKKNRPSDIYGGYSQSVTAYMSLVFFKNTFKLIKMPLVAANAIKNSLSSYHDTILKILGSNEFKVLIPKVKMNQLIKEGDSLYTVVGVYKHNAQQLILSDNSMGIITKPIREICDSDLDSVFNELVDNIDKYLNLYKIEDKLTIKEKFYALKNKESKFKCISDILVGTHCNAGRSNLKIIGLSSYWGMFSGNNDGLKINENSQLIYQSPTGLFEHRVKVSDL

SEQ ID NO: 888 - protein, 1402 aa, Lactobacillus floricola
MTYRNYHIGLDIGTSSVGFAVRYDNGELVHKKGSNLVGARLFKEGETAEERRLNRGARRRYNRRKWRLNLLNQIFKPLIEVNDPTFFKRLEQSNLVNYDKSESFSLLNNQSDDKLHQQFPTIYHLRDYLMKSTEKADIRLIYLAVHHIVKYRGNFLDASPVDSFEASNLKVDEILTQINLLLDNLTDDLRLNTQYVTDIEQTLLSNTESNKDKEKVIQKLLLHKEAIKIDKDRTAQIAKLVLGYKADIAKLFGITEKLQTPKLELSAANSDDALMELSAELNEDQIGILLQLKTLYSRVRLNQIIPSGTSLSKSMIEKYELHHTQLKSFKENILLKLRRNTAVRRNLELAYALYVGNAQTKQEVFEPKKARFTSDDFASLKANAKSASSVKEAPKNTKTKLTTDDFYNILTELFATFESELSADEDMIKEVEQIKKAITGDNYLPKQRTDQNGNIPHQLHQIELRQILQNQLPHYPEMDKINEQKPIEKLVTFRVPYYIGPLITPEDQQKSSAANFAWMKRKEQGAITPWNFDDKVDRMQSATNFIKRMTVKDTYLINEDVLPDRSLLYQRFKVLNELNLVKVNNQLLSIGEKQAIYHDLFEKQKTVSTKKLQSYLQSEQGYGDNIEISGLSNPDKFNNGLTTYIDFKNIFGDLVEDTTKQKEFEQIIEWSTVFEDRAIFKAKLQEVNWLTEEQIKALVAKRYSGWGRLSYRLLAELVNDNGERIIDILWNNKGSNLMSIVSQDEFQQQIARINSHEVQELGMESVLANAYTSPQNKKAIRQVMKVVDDIQLAMNGQAPTSISIEFTRKPEENSEISKSRYETITSIYQSLSKDIEKEVKDNLNKNKSSLKKNLSDKYYLYFTQLGRDIYTNQPIPFNEIPYYDIDHIVPRSVEMNDSLNNRVLVAKSINQIKKNNAPIDSSLKITSETRQLWKKLLDSGLITKQKYYKLSSSIKNTVSPYVKQGFINRQLVETSQVIKLVANILGTKYQNDDTEIIEVKAHLNSEIRKTFEFYKLRELNDYHHGFDAYLTTLVGGYLYNRYPKLRSYFVYGDHKRLDKAQLSELKNFNFLHGLTNPKSGSDGLITASGSQQVVLDRNETIKRLNKIYRYKYMLISREVFTKQGQFYNETIYPAKPNTAKMIPLKDNKPSEVYGGYSSSNVSKIALIKEKNTDNYQFIGIPIRSIAKLKQAKANSKTVYQTELNRVIKSVLASQKTKKQKEFEVILDNVKYNQVVVDQGEKYYLGSPYYKKNAKQLVISPESVKILADKATADLPEQEAHNKLMTVYQEIVDVLNKHFALYDINNVRKKLNDGLIKFSQLPNYDETSKNRFDISKSIKTKYAVIMRILSGIKNQTSEVPELGLKSPLNKMQTKGGIKISPEAKIYYSSPTGIFSHFKQVKNL

SEQ ID NO: 889 - protein, 1346 aa, Lactobacillus floricola
MNQTKNYDIGLDIGVGSVGWTITDSQSQKVLKVKGKQGIGVHLFNEGQTAEERRQFRTNRRRLKRRKWRLRLLRELFDEPISSIDPEFFARLKYFNESSKDPKNKGYQPQLHDDLKDVDFYRQYPTIYHLRHALMTQKEKFDIRDIYLAIHHIVKYRGHFLMNGHSSSFSVAQTDWKADLTKLFELIQETRTNLDFSFDLTEIDTIKSLLFDKNLSRNDRQKEIVGLINNNSQLDKKDKALTKQLVESVVKGIVGMKTRTDILLGYEVDNKEQSKAWNFSIDELDDQMATIDPALSQNSQAHDIITLIQKLYMTVQLAQIVPEGQSVSEMMINRYNLYAEQLQQLKDYKKINLETGLLLREAYDELMTKALTAAPGKTIHDTFYNKVKKILKDQDNKQALSIKQAIEDSNYLIPLRIKSNGVIPYQLHQRELDAIIENQKEFYPFLATPNPVDGHQEALPYKLDELIGFKVPYYVGPMVDPEVDSDQNFAWMVRKEKGEITPWNFHNKVDITQSADNFIKRMKTTDTYLIGKDVLPQNSLLYQRYTVLNELNGIKVANKKLTIEQKQRLYDQLFKKKKTVKKQDILNNLVAAGEIHEDDNLTGLSNGTTFNNNLGSYIDYCKIIGQDKLEDASKQADIERIIEWSTTFEDANIFLTKLAEINWLTEDQRQKLSQIRYRGWGQFSKTLLTDIKDNKDNSIIDNLMSTKKVFMQIINDTTIKQKIDDYNQYHLNHADLKDTIANLFTSPQNKRAINQTLLVIEDIINAVGHKPNRIFIESAKDNRNAKNQLTQSRLKRIVKQFEDNKQHVDQSVYEELKQLDDGSHASIDDRLLLYFLQNGKDMYTGQPIDISQLSTSQYHIDHILPQAKVMDNALDNRVLVSSKANTEKSDRFLSEIPQFQQRSLWAELERMGFLTKAKKERLLMTSDEFKQNSVRFIARQLVETRQIIKLVNQLIIQEHPEVKLVNIKADLTNAFRKKFNFVKNRNANDYHHAFDAYLTSLIGSHLLKSHPKWEPLFVYSDYDKIKFDNAPQGVNIMKEFEQSKLADENGEIIWNKDEMMAYLERLYNSRQILITKKVYARHGNLFKQTIFKAGESDNLIPVKNNRSDIAIYGGYKSKQVSYYALISLHNKKRQKRLVAVYLIDIQKLQNLNESDYFKTLHTIIKERHNIKPEFDILADKIYQNQLIIDNKNGSNRPFRIEGDFKNDRQLYLPLQYQRWLASKEPTDEKLNRIFDHICEQLADYFPLFAGNACDKLLDNRDKFYQLSIKSEFNDKGKLIAEGKLSVIDKLLVAMHADSRNSNLAVIGLSSSWGRFKLHGGNEAIGTSVQLIHQSPTGLFKRIQRFN

SEQ ID NO: 890 - protein, 1354 aa, Lactobacillus coryniformis
MTLHYNVGLDIGTNSVGYTIVDDNGKILQVKGKNGYGVRVFKEGATAAERRIFRTTHRRLKRRKWRLRLLQDFFEPYILPQDDGFFIRRKESNLVLNDRDEDTASLFNDRSDRDFYQAYPTIYHLRQALMTEKRQFDVREIYLAMHHIIKYRGHFLLNGTVNNFTNNKIDLHSDFEELNALLLNVIPELKFQIDLDHSTMFQTTLLNTTISRSGRQRDLVKSFYNGSDDKQLAKQQKSVATELLKAILGLKAKFHKLFNLDLLETTEWEFSFDAEDIDDKLAKLEPLMTENQQQVMDILQRIFAAITLNGIVPEGKTLSASKVDSYQKHKQDLKLLKAIAQHSDKKTATVLQTAYNEYINGIASKPLKQEDFYKRLTNAVKKSSDPQVADMLALIDQEKFLPKQRTKENGAIPHQLHQLELERIIDNQKDYYPWLAELNPNQARQKVAKYKLSELVAFRVPYYVGPLIEPEVQQATSNAHFAWMARKEAGPITPWNFDQKVDRNVSAERFIKRMTTKDTYLLAEDVLPLHSLLYQRFIVLNELNNVRVNGQKLTKKQKQAVYQDLFKRQPHVTKKQFKSYLVQTGEFAESSKIEGLANETSFNSGLTTENELRKIFGAQLDEARYQVDFEQIIEWATLFEDAKILRTKLAEITWLTTEQIEKLAGIRYRGWGRFSRKLLAGLRDQNGQQIIDLLWDTPNNFMVIVSQAAFSEAITKENEKLIDRRGAQDVITDLYTSPQNKKALRQVLAIVADVQKAMGGVPPQRIFIEFAREDEKNPRRSVERSRQLEKLYQTISNEFLINSEVRQELKEAVDQKVNFKDRLFLYFLQGGVDLYSGKRINIDQLSHYDIDHILPQSFIKDDSLDNRVLVSQKLNRSKSDSVPLSEFANYKFGPAMQAKWLQLKEAGLLSKRKYDNLTLDPTKLSKFAPLGFVNRQLVETRQVIKLAANLLASEETKVVTIKANMTHQVRKELDFPKNRNVNNYHHAFDAYLTAFVGIFLSKRYPKLKPYFTYGDFQKGNKLPDLKNFNFLYELKNKDRSIDSNTGEIIWDKQRDLAYMNKIYNFKKVTVVHEVLTKSGALYNQTLYKASEDKASGRGTKQLIRKKDNMPTELYGGYTGSTSAFMSIVRLWKKDKPYYKVVGIPTRMAAKLANQAQLLDYLTKKFTTRKLVKKTGDYKTTVERFELVVPKVGFNQLVIDGGQPFMLGSATYQYNARELFISKEAVKALNKQLSTHVDLVQVFDEILVQVNRWFPLYDTNGFREKLSHGRDRFMKLNDSFEEKSDTQIDVLNRILIGFHANAARTNLKILGLGTDLGFMTQQAGIRLTEKAILVHQSPSGLFERKVALRDLKGLR

SEQ ID NO: 891 - protein, 1128 aa, Lactobacillus tucceti
MDRKISLGLDIGVSSVGYSVIDVDTGKVLELGSRLINGKIGTENQARREMRGTRRLINRKKQRRKDTVKLFNEFKLIDSKKDEHYFDHFANNSDPYELRVKGLSEKLSLSEIADGLYHIVKRRGISYDLKDADEESEGSEYENGLKINNSELKNQTPAQIQLKRLNEYGAIRGKVVIDEEKILLNVFPTKAYLDEAKRIIEKQREFYPGILTEEFEEKYCQILTRKRDYFVGPGSEKSRTDYGIYKEDGRTLNNLFEELIGHDKIYPEELRASGASFTAQLFNVLNDLNNLHISSYEDQKLTTENKEQIISELKSTTSNVNMMKLIQKIAGCEESDISGYRTDKNYKPEISSMRIYRKVHKKLLESEIDITNWPDDFINKLSFILTLNTENGEIRNQLKNRLQPEYDFLTDELIQTIIDNKESFDIKSNNKWHRFSIKTMELLIPEMIKRPVEQMTLINEMGLIKNSGKKFSNYKYLPYKKIAEDIYNPVASKSVREALKIVNAILKEYGHIEYIVVEMPRDKNEDEAKDQIEKFQKANGRLKDAALEEFTEAIGDKSTVDKKLGVHRSKLLFKIRLWYQQRGMDLYEGKPISAVDLLNNPDSFQIDHIIPQSVSFDDSFNNKTLCNSGLNQIKDKKTPFEYMNEGYGQGFDSMKAMVMKNPRIDHNKRKNYLFSENVSDIETRKRFISRNLVDTRYASRVVLNNLQEFFKEKESDTKISIIRGKFTSNLRKHWKINKNRDTYHHHAIDATIIAATPFLNIWKKGSSIFPSNVESEDFFDIKTGKIIGNDEFNKYAYDEPYNGFYNELRNATDRIKFSHQIDKKMNRKVSDSTIYSTRVAKSPKNKKESEYIVAKIKNIYDADEYAKFKRIYDKDKTKFLLNKYDPRSFNHLEKIMNTYPDSIERTMSNNKVKVVRISPFELYRQDHGPVKKYSKKNNGPEIKQLKYLDKKVGSSIDVTPDNAKNKHVILKSLKPWRTDIYLNHETGEYEIMGIKYSDLKFNKGEGYGIKKAKYLEIKHREKVSDDSEFMFTLYKKNRIKVENMETDESVEMLFWSRTMDSQKGYAELKPIYKYKTEDDNWPIYGNAKKQIIKKLIPKNCKIWKVNTDVLGNPFYVEKEGEYPKDVLD

SEQ ID NO: 892 - protein, 1371 aa, Lactobacillus buchneri
MKVNNYHIGLDIGTSSIGWVAIGEDGKPLRIKGKTAIGARLFQEGNPAADRRMFRTTRRRLSRRKWRLKLLEEIFDPYITPVDSTFFARLKQSNLSPKDSRKEFKGSMLFPDLTDMQYHKDYPTIYHLRHALMTQDEKFDIRMVYLAIHHIVKYRGNFLNSTPVDSFKASKVNFVDQFKKLNELYTAINPEESFQINLANSEDIGHQFLDPSIRKFDKKKQIPKIVPVSVDDKATDKINGKIASEIINAILGYKSKLDVVVQCTPVDSKSWALKFDEEDIDAKLQKILPEMDENQQSIIAILQNLYSQVTLNQIVPNGMSLSESMIEKYNDHHDHLKLYKKIIDQLADPKKKAALKKAYSQYVGDDGKVIEQADFWSSVKKNLDDSDLSKQIMDLIDAEKFMPKQRTSQNGVIPHQLHQRELDEIIEHQSKYYPWLAEINPNKHDLHLAKYKIEELVAFRVPYYVGPMITPDDQAKSAETVFSWMERKGKEAGQITPWNFDEKVDRNASANRFIKRMTTKDTYLIGEDVLPDESLLYEKFKVLNELNMVRVNGKLLKVADKQAIFQDLFENYKHISVKKLQNYIKSKTGLPSDPEISGLSDPEYFNNSLGTYNDFKKLFGNKVDEPDLQDDFEKIVEWSTVFEDKRILREKLNEITWLSDQQKDVLESSRYQGWGRLSKKLLTGIVNDQGERIIDELWNTNKNFMQIQSDNDFAKRIHEANADQMKAVDVEDVLADAYTSPQNKKAIRQVVKVVDDIQKAMGGVAPKYISIEFTRSEDRNPRRTISRQRQLENTLKDTAKSLAKSINPELLSELDNAAKSKKGLIDRLYLYFTQLGKDIYTGKPINIDEISTYDIDHILPQAFVKDDSLNNRVLVSKAINNGKSDNVPVQLFGAKMGHFWKQLAEAGLISKRKLKNLQTDPDTISKYAMHGFIRRQLVETSQVIKLVANILGDKYRNDDTKIIEITARMNHQMRDEFGFIKNREINDYHHAFDAYLTAFLGRYLYHRYIKLRPYFVYGDFKKFKEDKVTMRNFNFLHDLTDDTQEKIADAETGEVIWDRENSIQQLKDVYHYKFMLISHEVYTLRGAMFNQTVYPASDAGKRKLIPIKADRPINVYGGYSGSADAYMAIVRIHNKKGDKYRVVGVPMRARDRLDAAKKVSDADYDRALKDVLTPQLTKTKKSRKTGEITQVVEDFEIVLGKVMYRQLMIDGDKKFMLGSSTYQYNAKQLVLSDQSVKTLASKGRLDPLQESMDYNNVYTEILDKVNQYFSLYDMNKFRHKLNLGFSKFISFPNHNVFDGNTKASSGKREILEEVLNGLHANPTFGNLKDIGITTPFGQLQQPNGILLSDEAKIRYQSPTGLFERTVSLKDL

SEQ ID NO: 893 - protein, 1129 aa, Lactobacillus futsaii
MADRISLGLDIGVASVGFSVLDIDKGKVIELGSRLFNATVAEGNQDRRSMRGARRLLNRNKQRRQDTGKLFQKFGLLDNFNKDNFYDTFNQNWNPYELRVKGLTEHLTKKELAESLYQIVKHRGISYALKDADADEGGTDYSASLKINSQELAEKTPAQIQLQRLNDYGKVRGQVVIGDDPDNQKVLLNVFPTSAYEKEAKQIIATQKQFYPEILTDEFTKEYCKILTRKRDYFVGPGNEKSRTDYGIYKTDGRTLDNLFEELIGHDKIYPDELRASAASYTAQLFNVLNDLNNLRILSYEDGKLTKEDKEKIIAEIKSNTTTINMLNVIKKVAGCSKEDIKGFRVNEKDKPEISSMAVYRKVHKDLLKVGVDISDWPVEFIDKLSFILTLNTENGEIRKQLNNRLVPEFDFLNDDLIQLIIDNKDSFEIKTNNKWHRFSLKTMNKLMPEMLERPVEQMTLLNEMGLVKKDKKRFENNKYLPYKEIAKDIFNPVASKSVREALKIVNAVLKKYGHIDYLVIEMPRDKNLKEEQDNIKEFQNKNKKAKDAAFEAFVKSVGSEQRVKEALSKNRKLQMKMRLWYQQQEIDPYNGETIDATDLINNPDKFEIDHIIPQSISFDDSINNKTLCFASMNQVKGQKTPYEFMLEGHGQGYDKFKATVLDNKNFDRNKRKNYLFEENVSDIETRKRFLSRNLVDTRYSSRVVLNSLQDFFHEKSADTKVTVIRGKFTSNMRKHWHIDKTRETFHHHAIDASIIAATPFLRMWKKGGTIFPVKVGEESIDIETGEILDDKKFDKVMYEEPYNGFVSEIMNADDRIKFSHQVDKKMNRKVSDATIYSTRTGKLAKDKKDAEYIVAKVKDIYSVDGFKKFKKVYDKDKSKFLLYKYDPRTFSELERIISDCPDKVEKVQTNGKVKAVDVSPFEMYRRYHGMIKKYSKKGNGPAIKQLKYLDKKLGSHIDITPANANGKHVILQSLKPWRTDVYLNHETGEYEIMGIKYSDLKFNKNVGYGIKKDKYLEIKKNEEVSEKSEFMFSLYRKDRVRIQNMKTGESVELLFWSRNFSNKKYAELKPIFKFVTEDDDWPVYGHAKTQILKRLVPKDCKIWKVNTTILGDPYYLEKESDNPKDILD

SEQ ID NO: 894 - protein, 1376 aa, Lactobacillus namurensis
MDKKYGIGLDIGTSSIGWTVVDKYGHIIRVKGQTGIGVRLFREGQTAAERRTFRTTRRRLSRRRWRLRLLREIFDEPISAIDENFFARQKASSLAPGDARYQQAFQLFNDRTDQAFYCKYPTIYHLRQALMTESRQFDIREIYLALHQIIKYRGHFLLGGAAKDFQSDKLDLEAYFTTINAQLAGIYSDGSVQLPTLDWNQACQELTDTSRTQSDRKNWLVKELKSYGDSQLKPIYTQIANAILGFKTDLAKIMGINDPEKALSFNLDALDDHRDDVAELLTDEQIPLVNLLAKLHTALELAAILPDGQTLSGKMVEIYETHRKQLKTYKAFIRQLPDRQQRLALKQAYDHYIDQGLNREAFYSEVKAILEKQKPLTATGQAMKKAMDQNAFLLKQRTKTNIAIPYQVQQQEMDQIIANQSKYYPWLATPNPVKSRRVIAPYKLDELVCFRVNYYVGPLVQSKPGEATKEAKFAWMTRKDPQSTVAITPWNFDQQVDRQASANAFIQRMKTTDTYLLGEDVIPKNSLLYQKYEVLNELNNVRVNGDWLDPQRKQYLFKKLFMDQPQSVVTVKALQKTLVVIGACPTLPTVEGLANPKRFLSQLTTYHDFCKLLPDDIQRADRQADIEKIINWSTIFEDTAIFKEKLRDIKWLSADQIRRLSSRPRYRGWGRFSAKLLCGLHDRQGNTVMDELWQTSRNFMQIIRQSDFQTAIAAVNQQDLGRQDLQRVIDDLYTSPQNKKAIRQVLAVVTDIQKAMHGKAPSWLFVEVAKGAQKNPQRTQSRQSKLAEAYRESARELVDEAVKEQLLTLPDDRQTFSDRLVLYFQQNGRDIYTGEPLDFERLSNYHIDHIIPQAVVKDDSLDNRVLTSNQANLEKGAHVPTIFRDKQEPVWQELYRVGLISHRKLRNLLTTPDDLDDRGRATGFIARQLVETRQVIKLVMEVLSQYYDTTETELISIKAGLSHQFRQELNLPKLRALNDYHHAQDAYLAARIGTYLLQRYPNLKRFFVYGDFKKTHFDLQRRFNFIGGMISREKQPYNLIKNPVTHQVIWDEEMEIGDCQKKNPEQPKHDATVKMMNLTKIMNLKHILVTHEVYENHGALFNQTIYPASQAHKKKLIPQKTEKPIELYGGHSSEQAGYMAIIRLLGKRPGYKVMRVPVRYVSQLQHQDVAEQKKLLYKIFVSELTSRNKVKPFEVVVPHVCLNQPVEDMIKGQWHRFALRTNGYYQNQQQLILSLVAQRTLAGYKPKDDELMAVYHEICKQVKYYFPLYKMNKFQSRLFAAEELLQKRSTVNSFSITIGKNGKENKTLNLGKRELLLRLLGGLHANATRVDLKDIGCTGQFGQLQVKNGIKLTEQAVLIHESPTGLFHRRVRLNDL

SEQ ID NO: 895 - protein, 1078 aa, Lactobacillus acidifarinae
MGYLIGLDIGITSVGYAVLQTDFKGNPYKILLMNTVIFPVAEAPKTGESLAAPVRQKRSSRRTNRRTKFRKLRVQKLFVRFGLLESADVATFLNQKVPHQDIWQLRKDALNRKLSNRELFEILYFFVGHRGFKSNRRSEVTGKQPKDNQVVLTSIHDRGNTLNDFDSLGEMMQELPEFKTIKHNKAYRPDNTIYPLRAWIEHELSAIFSVQQKNNRQITDNFITQYLDIFRSQRDFDQGPAAPSRFGGNMIERMVGPDSLDAHEKRAAKLTNTFFRFNFLSTLNNLKIQLTLGAEFHPLTTPQREIVLQAATLKSLNYKQIRHKLQLPDSARFNLVPYQSNEDPIKTESKHYLFKRKALTQIEAVTDNPQLIDKIGTILAYFKGDKTRQEKLSALNLSRAEIKQLLPINQPGFGNLSLKTMHKILPYLEQGHLYHEAAQLAGYDFQNNLVDRQYLRDNLKNPVVNRAIGKTIKVVNAIIKKYGDPDAIHIELTREIKHSHEERQKIARQMNTNMDQNDKVAEHLRENGIPVNGQNIIKSKLFYEQKGIDLYSGQQINEQDLYTEDHYQVDHIIPYSISFNDSFTNKTVTRTSNNQNKANRLPLEYLSEEKQDAFRARVMSNISNYRKRQNLLKEGITEDNRQQWKTRNINDTGYINRLLSQYLRNNVQFTKKSHNPVFTVNGATTAYIRKRYGIIKNRQATDLHHAVDAVIIGCISNTFVSRLAKYSEAQEARYHKQLWQITQYRQEHKDLSTIEYQELIKQFPLPWPDFRHELMARLSTDPAKMMAHHTWEHYTDEEISQLKPAFVIRSANHKVTGSAHDDTIYSKKLYDQRGVGLLRTSLQNLKYDSKKDGIKNYERLKDGSNSLVYDSLLRALKEHDGNAKKAFPDNQLLISTGNHQQIITHVKTVKKITHPIEVNRDTAIAIGGRMIRVDIFKQAKAQKLIGIPVYVNDTVKPTLPNRACTSGKRYSDWYQLTRQDQFLCSLVSNDLVLVETASPLKVTNNITNEEVQTTQLLCYFSSFNIANAQINFHSINNDSSINPIVLNKVTYLTKYQLDYLGNYFPVKHESRKTFNRKR

SEQ ID NO: 896 - protein, 1351 aa, Lactobacillus zymae
MYKKYGIGLDIGTSSIGWSVVDEYGHIIRVKGQTGLGVRLFREGQPAADRRTFRTTRRRLGRRRWRLRLLREIFDPYIAAQDPNFFARQKASAIAPGDSRFKAVYRLFNDQTDRQFYDKYPTVYHLRQKLMTEKRQFDIREIYLAVHHIVKYRGHFLTGGAAKNFKPGKLDLNTYFATINAQLAAIFMDSQVELPQLDWDAVVSLLTNDQESPSDRQKALTKMLVAQGDATQKRFYTEFSKALLGLKAKLYVLTGFEGDKTDQKALTLSLETLDDHQDDVTQLLGDEQRQLVELLARVQSAIQLAIIIPNGKTFSGQMVQQYQTHYDQLRLLKDYREQLTDQKHRRALKQAYADYLANDQDQDALVKAVEKVLKQNQPLSTVGVRLQTAIDAGDFLPKQRTKANSVIPHQIHQQELDRIIEAQSVYYPWLAEENPVAAHRSYAPYKLDELVDFRVPYYVGPLVQPQADKAAKETKFAWMTRKEAQSTTPITPWNFEQEVDRNASANAFIQRMKTTDTYLLGEDVLPKNSLLYQRFEVLNELNNVRVDGKLLTIAEKQRLFQDLFVDRSQASVTIAQLQANLIAHGAAKDRVEIKGLADPKRFLSSLTTYHDYAQIIPEALEQPDKRADIEKIINWSTIFEDTSIFKEKLQEIAWLTPDQRRQLSQKRYRGWGQLSDKLLTQLRDATGQSVMDLLWTEPNNFMQIIRRTEFQQAIARVNQTDLKQQDLATTINDLYTSPQNKKAIRQVLLVVADIQTAMHEVAPSWLFIEAARGPEQNPKRKLARQQQLLEAYKTSAKEIVNEAVKEKLLSAIDDHQKFEDQVVLYFQQNGLDMYTGKPLDFERLSKYHIDHIIPQSVVKDDSLDNRVLTTPEENERKGARVPGPLYASQQGRWRLLQRAGLISQRKLDHLLLRPEELDQQATGFVARQLVETRQVIKLITNILSQQYDPEQTKLVSVKAGLSHQFRTRLNLPKLRELNDYHHAHDAYLAARIGTYLLQRYPNLERFFVYGQYQKTRFDLKRHFNFIGEMLKGKPEDAVIVKAPHSETVIWDKQDEVKQLKKIMEYRHLLVTHEVYDNHGALFNQTIHPAKNPKNRKLIPRKTTQSTELYGGYSGETTGYLAIARTVTKNKISYQVLRVPTRLVGRLQRSSESAQRQILTDWFAPSFVSRGKQQPFEIVLRHVFKNQTVIDDIHEQSHRFGLRSDTYYCNQQQLVLSLEQQRMIIDQKLNNTNKLMVVYEAVCDQVAKYFPLYRMNHFKESLLEAGPKLAELPINTVQSKNGKLKLGQRSVLLQTMQGLHANPETKDLSIIGCPKYFGKLQVSSGIKLTENAVLIHESPTGLFQRRVRLSDL

SEQ ID NO: 897 - protein, 1363 aa, Lactobacillus hordei
MENNRYNVGLDIGTSSIGFAVTDEQDELVQVKGKNYIGVRLFKEGQTASERRSFRTTRRRLKRRKWRLGLLEEIFAPYLAQGDPYFLARMKESNISPRDERKKYYGSLLFSDDTVFYDKYPTVYHLRHALMTEDRKFDIREIYLAVHHIIKYRGNFLINTLINEFSSKAVDFKKDADILNDLFEQFYISDINDSFQLNTADMNEISELLLDNSKTRLDRQRESLKKLAKKVDDISVAKKHQKIATEFSKAILGNKAKFDVILNVTTDSSNDWSFKLEDEDADEKIVVLLEELNTPQQEALNIIHQWYSQISLNGIVPDGKSISEAMISSYELHKEHLALLKQQINNTKDKKKAHGLHEAYNEYVHGNNNKKLNQADFYSKVKQNLESSLITDEILELINAENFMPKQRTSANGVIPHQLHQQELDRIIQNQAKYYPFLAETNPNEKRSKVAKYKLDELVAFRVPYYVGPLITATDQKKTSGKEFAWMVRKQPGRITPWNFDEKVNKMESANTFIRRMTTKDSYLIAEDVLPDESLLYQKFKVLNELNNLRADGRKLKVSVKQKVFKELFQQQKTITIVKLQNYLKAECSFLTTPEISGLSKPEHFVSSLATYIDLKKIFGEDIDNPARQNDFERMIEWATIFEDKNIYSEKLNEIKWLNDRQKKELKNKNYHGWGKLSAKLLKGLRDSDECSIIEHMWNTQQNFMQVQAEEDFAQRIQEENNQHLKGNTLEEVLADAYTSPQNKKAIRQVVKVIEDIQKAMGGIAPQKISIEFTRAPEEKPRRSVERQQQIEKIYKSVANEVENAGVKDELQRFSDRKQTLTDKYFLYFTQLGKDMYTGKSINIDQIGNYQIDHILPQAFIKDDSLDNRVLVSAAVNNGKSDNVPTKNDRYKVREHGQRLYDQGLISKRKFNNLITDPDSINKFTARGFVKRQLVETSQVIRLVAEFLYNKYQSKSEIIEVRAKMNSQLRKDFGLIKNRNVNDYHHALDAYLTTFIGNYLYRRYPKLRAYFTYGCFKKVDDSQLKYFNFLHDIEDDKKKIIKDNDTGEILWHRDEGIARFKRIYNFKYMLVTHEVLTRQGAMFKQTVYSAAVAGSKKLIPVKEDRPIDIYGGYTNNNDAFLAIVKVTKKKQYMVVGIPQRAVVKLNDAAKQGSKAYQKVLYNVIKPQFIKKKKDRKTGKITQKLENFEIVVSKTLYRQLIIDGDQKYMLGSSAYKYNAKQLVLSEYALEVLDRSIFEKKEYTTVDLDNVYDEILAQVDKYFSLYDKNKFRQKLHESRKIFTELPINNLFSGTKLLKSGKRETLNEILEGLHANATKKDLKSLKFSTPLGMIQYPSGIILSENAILCYQSPTGIFERRVTLKDL

SEQ ID NO: 898 - protein, 1170 aa, Lactobacillus hordei
MSKYNVGLDIGIASVGWSIVDADKKKIIDLGSRIFSSGNAAANQERRGFRGTRRLIRRRKNRLTDVINFFGEKKFIDTKVVDKNGHVHYKFSVNNTESPYELRVKGLSEILTKQELVIALYHIVKHRGISYDLGDLEDDGTSGVTDYKTSININRQLLNEKTVGQIQLERLNEFGKVRGQVEENENVTLLNVFPSAAYVKEATQILTKQREFYPEITDDFIAKFMLFITRKRDYFVGPGNEKSRTDYGIYKKDGRTLDNLFDELIGIDKINGEKRASASSLTAQIYNMLNDLNNLTVPNTEDGRLTIQTKKEILEAAKTTNGLFGIAQICKIIGCKKDDIKGFRIDKSEKKIMHTLSGYRKFRKELADVNIEANDLNINLVNKIADILTLNTEKAEIRKQLDKSNMDISNEMKEIVINKNKEFLVDGRATWHSFSYKTLNLLIPELLNTPEEQMTILTRLGLVKPNNKKYEGLKNIPARRITEEIYNPVVARATREAVNVFNAITKKVGRDNIKDVIIELPREDNEVDIKKGIVKRQKQNEVEKETADALVKQHMTISDSALIAQYRKIRGLSQKVRYWYQQDTICPYCGKKIEAVQLINNNDSFEVDHIVPISVSFDDSQNNKVLVHSQCNQAKEKQTPLGWLNNGGGFGQSKADYIARVKSNKNYAKNKIDNLLNETDLNDIATQRGFIQRNLNDTRYASRIVLNEFYSFFRSNNLSTKVKVVRGKWTSQMRKKWNGVGGLSKTRDTYHHHAIDACIIACFPLLKAFDKAIKLIDVDGETGEILQDKKAIKLAQEAEIVEKISVIKNKKFENMVNEIYNFPLFKQVELANDITNLENPVKFSHHVDKKANRAVANQTIYGTRIKEKEVTKRGKKEKIQERYTLGTIKNIYDIDGFMNFKKLYDKISKNDDVKFLMQKNDPKTWEKLIDIFNSYPDSEEVTQVDGKVKRVAVSPFKLYYRENGFITKYSKHNDGPKVVSIKYYDSKVGSHIDITPKDARNKVILQSLKPWRTDVYFNSITQQYELLGLKYSDLKFTNGVYGITRDAYEKLKHGVSEDGVTAWKPISKNSEFRFSLYRNDRVRVIDEKGDSIELLFASRTTSNEGYVELKPIYKAKFDSKEEVGFYGLVSNGRLIKKMSKGGYKLYKVNTDILGKPYYVTRESDEPKLSL

SEQ ID NO: 899 - protein, 1395 aa, Lactobacillus otakiensis
MVISSCIIGDVPKGVTGQHYFEEFYRMKVNNYHIGLDIGTSSIGWVAMGEDGKPLRVKGKTAIGARLFQEGNPAADRRMFRTTRRRLNRRKWRLKLLDEIFDPYITPVDSTFFARLKQSNLSPKDSRKEFKGSMLFPDLTDKQYHLDYPTIYHLRHALMTQDKQFDIRMVYLAIHHIVKYRGNFLNSTPVDSFKASKVNFDDQFKKLNELYTAINPEESFQINLANSEKIGQQFLDPSIRKFDKKKQIPKIVPVTMDDKAVDKLNGKIASEIINAILGYKSKLDVAVQCDPEDSNPWAVKFDDEDIDAKLQKILPEMDENQQSIIGIIQDLYSQVTLNQIVPNGMSLSESMIKKYNDHHDHLKLYKKLIGQISDSKKKTALKKAYDQYVGNDGKVIEQDDFYSSVKKNLDDSELSKQIMDLIDADKFMPKQRTSQNGVIPHQLHQRELDEIIEHQSKYYPWLAESNPNKHDLHLAKYKIEELVAFRIPYYVGPMITPEDQKKSGAAVFSWMKRKEPGQITPWNFDEKVDRMESANKFIKRMTTKDTYLIGEDVLPDESLLYEKFKVLNELNMVRVNGDSLKVADKQAIYQDLFENYKHISVKKLQNYIKGKTGLPNNPEISGLSDPDQFNNSLGTYNDFKKLFGDKVDDPDLQNDFEKIVEWSTVFEDKKILRAKLNEITWLTDKQKDDLESSRYQGWGRLSKKLLTGIVNDQGERIIDELWNTNKNFMQIQSDDDFAKRIHEANADQMKSTNMEDVLADAYTSPQNKKAIRQVVKVVDDIQKAMGGVAPKFISIEFTRSEDRNPRRTISRQRQLENTLKDTAKSLVKSMNPNILSELDNASRSKKGLTDRLYLYFTQLGKDMYTGEPINIDEISNYDIDHILPQAFIKDDSLSNRVLVSKAVNNGKSANVPLKLFGAKMGHFWKQLAEAGLINKHKLKNLQTNPDTISKFAMHGFIRRQLVETSQVIKLVANILGDKYRNDDTKIIEITARMNHQMRDEFGFIKNREINDYHHAFDAYLTAFLGRYLYHRYIKLRPYFVYGDFKKFREDKVTMRNFNFLHDLTDDTQARIADTETGEVIWDRETSIKQLRDVYHYKFMLISQEVYTLRGAMFNQTIYPASQAGRKKLIPMKADKPVDVYGGYSGSTDAYMAIVRIHDKKGDKYKVVGVPMRALNRLNTAKNVSDAKYDQELKEVLTPQFTKSKKNRKTGEITQTVEDFEVVLGKVMYRQLVIDGDKKFMLGSSTYQYNAKQLVLSDESIKTLASEGKLNEAQESAAYDKVYDEILDKVNKYFALYDTNKFRQKLSLGKDKFVGLPNHNVFDGSKKISSGKREILNEILNGLHANATLGTLSDIGFSTPFGKMQQPRGIGLSSNTSIEYESFTGLFKRTIFLKDL

SEQ ID NO: 900 - protein, 1368 aa, Lactobacillus kefiri
MRVKVYYIGLDIGTSSIGWVVMGEDGKPVRVKGKTAIGARLFQEGHVAADRRMFRTTRRRLNRRKWRLKLLDEIFDPYITPVDSTFFARLKQSNLSPKDSRKEFKGSMLFPDLTDKQYHEDYPTIYHLRRALMTEDKKFDIRMVYLAIHHIVKYRGNFLNSATVDTFKASKVDFKKSFNQLNELYSAINPEDAFQVDMNKSDETGRLFLDSSIRKFDKQKQISKLIPVVVEDKEAKKLNGKIALEITKAILGYKSKLNVVTQTEPEDPKKWAVKFDDEDIDSKLNDILPEMDENQQSIVEIIQDLYSQVTLNQIVPNGMSLSDSMIKKYNDHHEHLKLYKKLIDNISDTKKRSALKTAYDKYVGDDGKTIEQDEFYSNVKKNLDDSDLSKQIADLIEAEKFMPKQRTSQNGVIPHQLHQRELDEIIEHQSKYYPWFAEANPNKHDLHLAKYKIEELVAFRIPYYVGPMITPEDQEKSSQTIFAWMKRKEPGQITPWNFDEKVDRMESANRFIKRMTTKDTYLIGEDVLPDQSLLYEKFKVLNELNMVRVNDHPLKVSEKQAIYRDLFENQKRISVKNLQNYVKSKSGLPTGPKISGLSDPDHFNSSLGTYNDFKKMFGDKVDDPDLQDDFEKMIEWSTIFEDKKILRAKLDEVAWLSDTQKNEFKEIRYQGWGRLSKKLLTGIVDGNGQRIIDELWNTNKNFMQIQSDDSFAKRIHEANANQMKATDVEDVLADAYTSPQNKKAIRQVVKVVDDIQKAMGGVAPKFISIEFTRSEDRNPRRTISRQRQLENTLKDTAQALVKSINPDILSELDNASKSKKGLTDRLYLYFTQLGKDMYTGKPINIDEISNYDIDHIFPQAFIKDDSLNNRVLVSKAGNNGKSANVPLKLFGAKMGGYWKQLADAGLIGQRKLKNLQTNPDTISKFAMHGFIRRQLVETSQVIKLVANILGDKYRNDDTKIIEITARMNHQMRDEFGFIKNREINDYHHAFDAYLTAFLGHYLYHRYIKLRPYFVYGDFKKFREDKVTMRNFNFLHDLTDDKQERIADTETGEVIWDRKRSIQQLRDVYHYKFMLISQEVFSLNKEMFKQKLFPATLAKKSKLIQIKKDKPVDIYGGYSNNTDAYLTVVKLKGSKEDKYKIVGVPMRALDNLKHAEKESPQSYTAELRKALEPQFTKIKKNRKTGEVSKVVTNFDIVLGRLFYRQMVIDGSEKSLIASSVYQYNAKQLVLSDQAIRTISDQEGIDEFELSSQYDKVYDEIVQKVEKLLPIFQHRHFQERLNNGKSLFVNLPVHDVYEGNKLEQVGKKHIINSILGGIHANADRPDIDLFGIKNLGQFSSTSGINLSSDAIICYQSPTGLFERRVVLKDL

SEQ ID NO: 901 - protein, 1364 aa, Lactobacillus fuchuensis
MNKRYNIGLDIGTNSIGWSVVNDQSQLVRIKGKLGYGVRLYDEGQTAEDRRLFRTTRRRLKRRKWRLGLLREIFEPYITPQDATFFLRQKQSNLSPKDLQKQQPQIGLFNDRLDSDFHYQYPTIYHLRYALMTEKRQFDLREIYLAMHHIVKYRGHFLNAAAASSFKSGEIDLAKDFAALNQIFGTIFSEVGFSLSESNLDEIKSILLDNNLSASVRQRKALPLIYQTAASKDSEKQYKAIATELLKAILGLKAKFNLITGIEVEDVKAWTLSFNAEDFDAKLSDLNIADNDDAVQIIEILRALYSGVLLTGIVPEGQSISQAMIDKYEAHKAHLIMLRSIREQLSDKENKALEKAYDDYIDHPEDKQHGSREDFYAAITKVLKKDSEDTNIIEILKLIELDQFMPKQRTKDNGAIPHQLHQQELDQIIENQKQYYPWLADINPNEQRQKMAPYKLDELVTFRVPYYVGPMITAEEQFQTSNKKFAWMIRKEPGAITPWNFDQKVDRQASANEFIKRMTTTDTYLLAEDVLPKQSLLYQRFEVLNELNGIKIDDQPITVEQKQAIFNDKFMQQAHVTVKNIQAYLVSEGQYASRPNITGLSDGEKFNSSLSTYHDLKKIFGDMIDDPNKQTDFEKMIEWSTIFEDGKIFADKLREINWLTDEQRQRLSNKRYRGWGQLSTKLLTKIVDQNGQRIIDILWNTNDNFMRIIHSDDFDQAVTQANQMLLADNDTQDVINELYTSPSNKKALRQILLVVADIQKAMKGQAPARILIEFAREKQANPRLSTQRRRQVEQVYQELNNDQLNKELADPQYANLSKDRLFLYFMQGGRDMYTGESLNIDRLSEYDIDHILPQAFIKDNSLDNRVLVSAKMNRSKSDHVPLDFTEERFGQKMRSQWEQMLRAGLLTRRKYNNLTLNPDSLNKYTMSGFINRQLVETRQVIKLATNLLVDQYADEDVQLVTVKSGLTHQMREDFDFPKNRNLNNYHHAFDAYLTAFVGLYLLKKYPKLAHYFVYGQYQQGFKANDQWRNFNFLNGLRQEQQVDAETGELIWQKDHDLAYMNKIYDFKKILVTREVHTNHGALYNQTLYKAKDDKASGQGGRQLIAAKENRPTAIYGGYSGKTVAYMCLVRITEKKGDFYRICGVQTAWVDELEHIEDATIKLQRLTALLTPQFSATKKQKDEVVTVVKPFEVLLPKILINQRFYDGGQELTLASATYKNNAQELVLDKKAVQVLNGQLPKAELEAQATVVYDQILERVQKYFPLYDMNSFREKLFVGRDKFNELPWQDQWENHKLIQVGQKTILDRILIGLHANAAMGDLKALNMSTPFGKLQKSNGISLSPETQIIYQSPTGLFERRVALKDL

SEQ ID NO: 902 - protein, 1363 aa, Lactobacillus diolivorans
MRGNYHIGLDIGTSSIGWAVIDDNAKVMRAKGKTAIGARLYNEGQTAADRRLFRTTRRRLNRRKWRLKLLDEIFDPYITPVDAAFFARLKQSNLSPKDQNRDWTGSMLFPDRTDRKFHKDYPTIYHLRHKLMTEDHQFDIREIYLAIHHIVKYRGNFLNTTPVSSFSVSDVKFDEQFDRLNELYAAVSPDEPFAINGDNSKAIETLLLSDETKKFDKQKQSAKLILSETGDKALDKENTKVATQISKAILGYKTQLDVLLKYDAINSSAWKIELDDENIDDTLPGLLSQLDENRQEMVSIIQNLYAQVTLNQIVPNGMSLSESMIEKYNAHRDHLKLLKQLEDKIDDPKKKKGLEAAYDAYVGKNMKVANQDVFYASVKKNLDDSDLAKQIADLIEAQKFMPKQRTSQNGVIPHQLHQLELDQIIENQSKYYPWLTAANPNPKRIHQAKYKLDELVAFRIPYYVGPLVTPEEQEKSANQVFAWMKRKQPGTITPWNFDQKVDRMASANRFIRRMTTKDTYLIGEDVLPDASLIYERFKVLNELNLVKANYHRLAPAQKQAAYRDLFENQKSISTKKLQNYLVDQGYFTAKPKITGLSDPERFNSSLGTYIDFKEIFGDQVDNPDRQDDYEKIIEWSTVFEDRQIYEAKLRTLDWLTEDQIQALKTKRYNGWGRLSKKLLTGIVDENGERIIDVLWNTNQNFMQVQSQESFAKRIHEANAKQMKVTGVEDILADAYTSPQNKKAIRQVIRVVDDIQKAMGGVAPTSVSIEFTRSEDQNPRRTQSRESQLQNTFKVDAKEIVDSDLVTELETVSKSKKGLTDRLYLYFTQLGKDMYTGDPLNIDELSTYDIDHILPQAFIKDDSLDNRVLVSKAVNNGKSNNVPVKLFGGKMGGFWKELADHRLISKRKLKHLLTDPDTIDKYTMRGFIRRQLVETSQVIKLVAQILGDKYQNDDTKIIEVTAKMNHQMRENFKLIKNREVNDYHHAVDAYLTAFVGQYLYKRYPKLRPYFVYGNFKKFNEDHVSFRYFNFLHELMDENNKRIVEPETGEVVLEREPAIAYMKRVYHFKFMLISQEVYTRRDAMFNQTIYPAKEANRRKLIAIKHGKPVDVYGGYSGSVDAYMAIVRIHDKKGDKYKVVGVPMRALEILNATHDKKDYDAKLKQILVPKFTKVKKSRKTGEITKKVEDFEIVLGKVMYRQLVIDGDKKFMVGSSTYLYNARQLVLSDSSLDTLASKGTLDSDADSKRLVAVYDEIVEKVDKYFPLYDKNAFRSGLHKGRDKYLLLPNRSTFNGAKKVHSGKREILNEILNGLHANATLGGLKDLKISTPFGKMQGQSGIPLSSNTIICYQSPTGLFEHRVSLKDL

SEQ ID NO: 903 - protein, 1357 aa, Lactobacillus mindensis
MNDRNKKYNIGLDIGTGSVGWAVTDNNYNLLHAKKKNLWGIRLFDGAETAASRRTFRSTRRRYRRRRNRINWLNEIFADELAKKDQSFLVRMNSSWVSKKDKIRQRDQYNLFMDSDYTDVEYHREFPTIFHLRKRLIEDKSQADIRLVYLALHNIIKYRGNFTYEHQNFDVSHMDSGLALLLNQLNQQLQAFEVAFPDETNFESMSTILLEKKTPTQKIDEIVDQIQPEKDLLQITKNIMKMLLGNKADLVKIFSLDSDDKITVEFSSNSIEQDLSNLEETLSDEQFNIITLANSIYSSIVLNDILSGETYLSFAKARQYSDHKKDLAKLKTMWRESPDRKAVGKAKKAYDDYLHSGKYGIEDFYKDMSKFLETATPVELAKEANEKILNKSYLLKQRNNENGVIPFQLNKNEMIEIINNQAKYYPFLAENKDKLLSILSFRIPYYVGPLQSKKDNPFAWMEKKSQGKIRPWNFDEIVDREASSNNFIRRMTSTDTYLIGEPVLPLKSPIYQKYEVLNELSNVRINADEVDNPLGDKLSVDLKQAIYNELFLKHRSVSKALLTKWLINQSYFQNPQISGLADSKKFNSGLTTYHDFKKIFGEDFVNDPTNQSQLEQLAEWLTIFEDKKILKIKLDDSQFNCTPEQIKKIAGMRYQGWGRLSKKLLCDIKTTTVTSKNHQQASYSILDLMWNTNRNFISVLKNDTYKFEDKIQTFNLDKNEAATPQAMIDELQTSPALKRGIRQSVTIIQELVKFMGHAPEHIFLEFTREDDVSSLTKSRDSRLNKLYARIAKNTKKTDDELKKSLLPSSDIKATLKANKNNLSNDRLMLYYLQMGKSLYSNQPLDINRLSEYQIDHILPQSYIKDNSLENRALVLASENQHKSSDLLLKPEIINQNIARWRYMKDAGLMGPKKFKNLTRIQITDSDQNNFINRQLVQTSQIIKHVSNILDSMYGDQGTQCVETRAHLSTEFRKAFSNEDDNYHFQHPEFVKNRNINDYHHAQDAYLACLLGLYQMKKYPTDNMILLKKEYKRFFSNTKKIYDKKHHFPDYVKNGWIIGSMFNGEKYVDEETGQIIWDQQTKDMVSCIFQYKQYNVTKRTEAANGEFYNQTVYKKDPNEKRKLISLKQGLDTKLYGGYSGDNPAYIVLVKIDDKKNKLVKMPIRLAEQVDNKTIDLQTWLEENVPHKKGIQVLKTKIPLGQVIYSKKNGYLALKSDTEIVNAQQLVLPYGYVALLTLLQKMPENKYDEVLACYDDGILDNIFVAIIDKMKHFYPYYSGELKTLSDNIDNFKESPDVNKIKTLQQLLLLLHASSTTASIEFNNVKKNSLGRKPNSINIQNTDLLSFSATGLYESRIHID

SEQ ID NO: 904 - protein, 1347 aa, Lactobacillus versmoldensis
MTKREEPYNVGLDIGSSSVGWAVVDNNYHLLNIKKNNLWGARLFKEAETAQVTRGHRSMRRRYRRRRNRLNWLDELFADELAKIDPSFLLRMKNSWVSKKESTRKRDPYNLFIDEKYNDVDYFNQYPTIFHLRKELITEDKKVDIRLIYLAIHNIIKYRGNFTLENQNFDISQLSSNFSQQISDFFALFSDFGVIMPEDFDPDKISDILLNPNLSPSGKVSEAIATISPKTNVKAKIKIILLLLVGNNGDLKKLFDLETTEKIAVKLSSRHIDSELPIILSELNEQQENIITIANSIFGSIILKDFLGDETSISAAKVISFEDHKQDLQKLKTMWRETSNKEAVKAGKKAYEDYIGHEDSETFYKKIKKFLEKAQPVDLANKALAEIELENYLPKQRNRNNTVIPYQLNENELIAILDHQEKYYPFLKENRDKILSLLTFRIPYYVGPLQDSNNNRFSWMTRKASGAIRPWNFSEKVNVEQSSNDFIKRMRSTDTYLIGEPVLPKKSLIYQCYEVLSELNNTRVKDGSSNPKRLDVTIKQRIYNEIFKNQKSVSVKVLQNWLIKESYFKSPEISGLADKKKYLSSLSTYIDFKKIFGQRFVDDPVNSPQLEELAEWLTLFEDKKILLIKLQNSKYSYDQATINKLSTMRYQGTGKLSKKLLVDLKTTKKSIGKSGAESLSILDLMWSTKDNFMQIIHDADYTFEQQIKEFNYDTEDELTPLEKVANLHGSPALKRGLNQSIKVVADIVKFMGHDPEKIFIEFTRSDDFSKLTISRYRRIKKQYLEIAKAIKKIPAEFKDIKEYQTQLEENKGKLASERLMLYFLQCGHSLYSNKPIDLNMINSSKYHVDHILPQSYIKDDSLENKALVLASENENKIDNMLISHDIIATNLPRWQALKDQNLMGSKKFADLTRTTVTENQKKGFIQRQLVQTSQIVKNITLILNDLYKNTSCIETRATLSSEFRKAFSNFDETTYHYQFPEFVKNRDVNDFHHAQDAFLACVIGEYQLKKYPKDNLRLVYDQYSKFLDSLKKDTRKKNGRMPRYTQNGFIIGSMFNGKTYVDDNGEIIWDQKIKESIRKTFNYHQFNVVRQTIEQHGKLFNDTIQPHSDRYKLIPLKTNRDPAIYGGYNNDNNAYSVVLDVDGKKKINGIPIRIANQLKSDELDLSSWLENNIKHKKPMTILIDKVPKYQRIINEETGDLLITSANEVINNVQLFLPSMYTALISLLDSTKTEMYSKLLSNYEANILIDIYDYLLTKLKNNYPLYRKEWAKLAEHRDDFIESDLVTQASTLQQLIKFMHADPSNVNLKFGNFKGNRFGRKNGNIKLSKTDFIYESPTGLFKSIKHID

SEQ ID NO: 905 - protein, 1390 aa, Lactobacillus psittaci
MKEVKDYIIGLDIGTNSCGYVVTDKQNNILKLKGKTAIGARLFKEGEAAADRRAFRTTRRRLARRRWRLGLLEEIFDEEMAKVDSSFFRRLKESDYSPKDSRKQFNSIVFESSEADKDFYDKYPTIYHLRNALMHDDQKHDLREIFLAVHHIVKYRGNFLREDSVKAFKAAKFTLQGEDGIGPVDKLNDLLKEIYIEAAPELATDNLSKIEEIIKDKKLYKQDKLKQVATLLTKEADTKDKAKLNKDVAKQVANAFMGYMIIFDTIFNLSDVDSKDYKVKFSDANIDEKLDTLTSLLTDKQTEFVLELQNIYNTIVLNEIVPDGKSLSESMVKKYDDHKEDLKLFKAYLNSLTDVKKVKELKAAYVLYVNNRKANLLAAKKLLGKKADNMNNFEIFSKFVADNLDDSELANKIRARLDLGEFLPKQRTNQNGVIPYQLHQVELTQILEKQGKYYPFLIAPNPVESHRNNAPYRISELVSFRVPYYVGPLIDPNNAESEQDKANSSFAWMVRQKQGQITPWNFEEMVDTTESANKFIKRMTTKDTYLLGEDVLPASSLIYQKFVILNELNNIKVNGIKLTSEEKHQIFDELFKVQKSVSLKNLVNFLTAHGCVAPNVTGLSDGTKFNSSYSTYIDYRKIFGAEIDNKDKQADFEKMIEWSTVFEDRKIFKRKLEEITWLTPDQIKQVSSKRYSGWGRLSKKLLTQITDENGVNILQRLWNESENLMQILSDPVIKEKIVAANSSFTKATDMEDILAEAYTSPQNKKAIRQVMRVVDDIIAAAHGKKPSQIAIEFAREDQDNPQMTKSRKAQLDQIYAKISDEFLDNAVKNELKNMKDNKPLAKDKVFLYFKQMGRDAYTGEKLSLDNLQDYDIDHIYPQSFIKDDSFDNRVLVQRAVNNGKSDNVPVLLFGNKQAADLGMTIRQMWKKWLELGLISKRKFNNLITDPEKISSYMASGFVNRQLVETSQVIKLVANILQAKLPDTEIIEVKASYNSILRKEFNLYKSREVNDYHHAIDAYLTTIVGNYLYQVYPKLRPYFVYGQFKKFGKAESKEDDPVKKIKQFNFIYQLLWGKDDAICISHTDQQVFSRSDIINKLTTAYNFKYMNVSQEVYTNSNNVFKQTVFPIIERDTAKSRSLIPKKLDRPTDIYGGYSNNNDAYLALVKVDKKKGSEYRVVGIPMRAAAMLKASKNYDEDLRKVIEPMVMLDKNGKAKRGIEGFRVLVGKMPFKQAVLDGDKKFMLTGTNDMPNLKQLVLSQQNMKYILDYIDDIDCRKHKFGNKTQDGNKCLLEVFDEIIQIVDKHFELFDNRSFREKLRNSRVNFINLALSKKAEALLAILNGLHANSMRTTIKELKISDLGRIQSSVISPEAQLIYQSPTGLFERRVKVKDL

SEQ ID NO: 906 - protein, 1368 aa, Lactobacillus paracollinoides
MDKKYSIGLDIGTSSIGFVGVDENGWPLNIKGKRAIGAHLFREGEAAAETRGFRTTRRRYNRRKWRLRLLREIFDEPISRVDPTFFARMKESSVSPKDPNYDGLAKEILIPRDKDGKILYPTIYHLRHALMYEDHQFDIREIYLAIHHIVKYRGHFLLDGAAKNFESSNLDLKSDIHEINAILVGIFGNEQVQFNDQYVEKLKEVLLDSTQSRSDRQKAAAKLLLPTNDLDKDTTKILKTVSTEITKAITGLKAKFFVITGNDIAKDQQKDWTFSIDTLDEKMSVIEPSFSEKNFSLITILQKLYSSVTLAGIVPNGLSLSEAMIQKYDRHASDLVLLKKYWDTKPKVLKHQLQNTYAEYIEIHQVVDEFYSDLSKLIKNDDDTLAQEIKSKITIGNFLPKQRTTENGVIPYQLQQRELDTIIKNQQEYYPWLAEENPVADHQIAFPYKLDELVGFRIPYYVGPMIAKEDTSNSKNSKFAWMIRKQSGEVTPWNFDEKIDRTASATAFIDRMTTTDTYLIGEDVLPKQSLIYQRFEVLNELNKISIDGQPITRKQKQSVYTHVFEKKKTVQVKDVQKFLVSSGEVMSLPKIGGLANEKQFNSSLSTLYDYNKIIPDALEDRNKVDDIEKIILWSTIFEDNSIFVEKLDSIDWLTSSQRKRLAQKRYRGWGRLSLRLLTTFKNKDGYSILDELWNSNHNFMEIQAQSDFSEQIATANNNNLSQVLPAKWEPGRKNLASLDEFISNLYTSPQNKKALRKAIRVVQDMMTAAGHMPEKIFIEVARDTSNSHQQTIARQRQLQQLYQSEDKEVIDSSVRSELDDILKNRANIKDQLFLYFQQGGRDLYTGKAINIDKLSLYHIDHILPQSLVKDDSLDNRVLVSQKTNEDKGVTFVSDKYMNNMLPTWKRWHEMGLISARKLKNLTMRPDEIDKYAPGFIQRQLVETRQVTKLVIELLDALLGNSQTEIITIKASLSHQFRQQFDLVKIREVNDNHHAFDAFLAARIGTYLYKRYPKLRPYFVYGQYMQNHKNLKSINLIKTLDSDKAIVDEGTGEILWDKKSDLAKMIKIYNYQRLLITHESRTSFGAMYKQKILKATDAKQNGGGFKLVPTKRNRPVDIYGGYTGQTAAYLTIVRVYSKKTSELRVLPIYTNKVQQIEKAMTQGDKATMLAFKKVIAPQLGKENKKTHEIKIPEFDVVIPKVLLDQLVIDDIAGSPHRFRLGTDTYYHNSQQLFLPLSMQRQLMDRESDDKVYLDIFNDVLKQVDSYFNLYDVNGFRAALQKSKKAFEQLPINDFPKDVPDNKKKKGKRSILKEIFIGLHANATLGNLKQMGIKTDFGKLQKSNGLRITENCKIIHQSPTGLFERIVPIK

SEQ ID NO: 907 - protein, 1357 aa, Lactobacillus oligofermentans
MAAKNYNIGLDIGTSSIGWAIVDDNYQLMHAKGKYGYGTRIYSEGQTAADRRGFRTTRRRLNRRKWRLRLLQDFFEPYILPQDEAFFIRQKQSNLVPQDTKKQYPESVLFDDTSDKDFYTEYPTIYHLRQALMTENRQFDIREVYLAIHHIVKYRGHFLNNAPVKTFKSGNLDLAIKFNELNEEFKSVYPDLELQFNLDQIDEIKKILLDSTKSRFDRQGEAVKLIYTVSEVKTIEKLQNKIVKQFLSGILGLNTRFDVLTNTESDDSMWKFSLDSESSDDALDEIIAQLDDPAIHVVELVNEIHSSITLAGIVPEGQGLSESMVEKYEAHKAHLQLLKAVEKLVDKKAADKLEVAYDQYINGKDSKQFIKEDFYKAVQSEIKGVAGDEVAEINQLIELDQFMPKQRTKENGAIPHQLHQHELDVIIENQSKYYDWLGEKVGNEYKLDKLVSFRVPYYVGPLVDTASKEKKDETRFAWMVRKNPESTEAITPWNFEDIVDKNASAENFIKRMTTKDKYLLNEDVLPKCSLLTQDFEVYNELNNIRVNGEKFTAEQKQLIHDELFTKHASVSIKQLKDFLVSELMYVRDNLKVEGLADEKKLMSSLSTQFDYQKIIPDQINDVKYREDIEQIIEWSTIFEDAAIFKTKLKEIDWLTDEQRNKLANKRYRGWGSLSKRLLACLVDENGQRIIDILRDSSDNFMMIVNRPEFKQAIFDENANLTETNSKKDMFEMIDNFYTSPQNKKAIRQVLLVVQDIQNAMGGVAPQKIFIEFAREDEVNGRRTNSRYSQIREMYSKVTDDVINKTVRGELEANKGSLNKEKLFLYFLQGGIDLYSGKTINIDNISSYDVDHVLPQSFIKDDSINNKVLVNAKGNRVKNDNVPMELFGAKMYPTWKRMVDTGIMSKAKFKNLTLNPDNVDKFKAEGFINRQLVETRQIIKLVAQILNDKLGDDTKIVSVKANLTHDMRVFFDFPKNRNVNNYHHAFDAYLSAFVGTYLYKRYPKLQPYFVYGEFKKMDKLKNMTSFDFLRDLKHTDKVVDKDTGEIIADKLAVITNMNKIYDFKKVLVTHEVHENSGAMYDQTLYPAKLDKSLGRKGAKQLIPKKDDMPTALYGGYTGSKDAFMSIVRLKKKDEVYYKVIGIPVRIADSVQHGKEVDVEALTQFIETKFTKENLNKKTGEITRKVEWFELVLPKVLFGQAVFDGGQPFMLGSSTYPHNLRELVLTKDSVKKIAGKESNKSYLDAYDEIMEAMNKYFPLYDTNKFREKVIEGRSKFIDLPDKDEYENNKLVQVGKSTIIDRMFIGLHANAARTDLKNIGITTPFGFMQQASGIKLTKDTVVLFQSSTGLFERKVALKDL

SEQ ID NO: 908 - protein, 1369 aa, Lactobacillus rossiae
MDKSKPYGIGLDIGTNSVGFVATDAEGHLIRLKGKTVIGAYLFNAGISAAERRGFRTTRRRLSRVKWRLGLLREIFETHFQESMGENEDNDFFLRFKYSNISPKDPQFSTAKGLFNDRTDKEFYDQYPTIYHLRRALMTEDHQFDIREIYIAMHHIVKYRGHFLKEGRAKDFKVGDLRLLDNFKMMNEQIEEINPLWQLKLPTDDASIKSITAILLDNTQSQNDRQKAVTKVILATLVKASDKDINAARKRFVGELSKAMVGLKTKLWVLADVSQNGDWEIKYENYADFAETIGSGESDTIQSLFNEINDLYGVITLAGIIPKEAESFSDGMVRKYEHHRKNLELLKVYCAEQSDGKRGRQIRQTYDKYIDGVDSKQFTQEDFYKALSKFTAKDEATSENAKLIAQEIAVGTFMPKLRTKANGTIPHQLHQKELDAIIENQKKYYPWLGEVNPVESHRRALPYKLDELVSFRIPYYVGPMVTPTKGDPEKSKFAWMVRKEPGTITPWNFDQKVDRSASGEAFIQRMKTTDTFLIGEDVLPQQSLLYQKFEVLNELNKIMINGKPICREQKQRLFKQLFMQYKTVTVKKVQQNLIANGEESENVPITGLSDPLRFNSSFSTYIDYKDILGTAAVNDNAKQSDIEQIIAWSTIFEDAAIFREKLNDITWLNDDQRNKLSHKRYRGWGRHSRKLLAGLRDGEGQTIIERLWNTNDNFMQIQNDSEIARQITEANSSKMATAEGTDEIIDGFYTSPENKKALREVMKVVKDIQRAHHGQAPAWVYIESPRETPRPGQRTVSREQQLTDLYEGAAKEIVDDAVLNELKDKVKSKENFTDKLVLYFLQNGHDIYANDSINIDNLNAYDIDHVLPQSLIKDDSLDNRVLTTHERNLKKSNRFATELFADQRKKWEKWHRLGLISSRKLKHLTMQPNSVEKFAHGFIARQLTETRQIIHLTANVLSNLYQENDTKIVMIKAGLNSEFRRTFDFPKNRSVNDYHHAFDAFLTAKIGRYLLARYPKLEPFFVYGNFVKNPKAMKRLSSFDFIAQLAAKTDDTSHIDQRSLKQVPVVNEETGEIVWDKDIELAELDKTYNYKTMLVKRAQTENNAQMFKQTVFKARDNQNKTLIPVKNGLSTDVYGGHSQQAISYLCIVWVGQKKKYRVLGISTAHAGILNNFEKNYGRFEAKKKLQEIVSNTLDNADRNDFKIVAPKVLFEQVVEDDNMKFGLGSASDYRNVQQLFLSRKNQLLLANMMTDQIHDQDLVHLFDEIVGQMNAHFPIFDRGGYRSSLTQSRDKFLKLPFKKNEDLITKQEVIRRILDGLHANANRKDLKIIGSKGDFGRLGTKKIYLSKDAKLIYTSPTCLFTRTVPLSSL

SEQ ID NO: 909 - protein, 1369 aa, Lactobacillus sakei
MAKTYNIGLDIGTNSIGWAVVDDQNHLMSIKGKYGYGVRLYDEGKTAEERRSFRTTRRRLKRRKWRLSLLREIFEPQITPLDNTFFLRQKQSSLSSKDNRKLYPEMSLFNDRTDTDFYTQYPTIYHLSRDLMTKNKQFDIREIYLAMYHIVKYRGHFLNESPVSSFKSSEIKLAENFETLNQIFNERFNESMFQLAVNDFDDLKALLLNDQQSASNRQKKALGMIYVPNENKSLEKQNKAIATELLKAILGLKAKFNVLTGIEVDDAKPWTLSFNSESFDEDIDKAATNIDDDSREIIAILQGLYSGILLAGIIPENQSLSEAMVEKYDQHAAHLKQLKSIYPLLSISDKKAIQQAYNYYIDGQDNAKAYSREDFYAATTKALKSYQDNETIAEILKLIELEQFMPKQRTKDNGAIPHQLHQQELERIIENQQKYYPWLAELNPNESRRKIAKYKLDELVAFRVPYYVGPLITSEQQQQSSNKKFAWMIRKAEGKITPWNFDEKVDRQASANEFIKRMTTTDTYLLAEDVLPKQSLVYQRFEVLNELNGIKIDDVPITVEQKQRIFNDLFMMQASVSVKNIQDYLVSKGYFASRPEITGLSDENKVISRLSTYHDLKAILGGIVDEANKQADLEKCVEWSTIFEDGKIFVEKLNEIEWLTDEQRKRLSSKRYRGWGRLSNKLLNQIVNENGQRIMDLLWDTTDNFMRIVHSEEFDKLISAANQTLLSKNDVQDVINDLYTSPQNKKALRQILLVVSDIQKAMKNQAPSKILIEFAREDEANPRLSVQRKRQVEQVYQNISKDILSDSDVKAELKDLTNTALANTRLFLYFMQGGHDMYTGETLNIDRLSEYDIDHILPQAFIKDNSLDNRVLVSAKMNRSKSDQVPLNDYTEERFGSKMRVQWEQMLRAGLITKRKYDNLTLNPDRISKYAMKGFINRQLVETRQVIKLVTNLLMDHYEDDEVQLITVKSGLIHQMREMFDFPKNRNLNNHHHAFDAYLTAFVGIYLLKRYPKLTPFFVYGSYQKNNTNDKWRNFNFLNDLKKEEVIDSDSHEVIWNKAQGLVELDKIYQFKKILVTREVHENTGALYNQTLYSAKDDKASGQGGKQLIPAKQDRPTALYGGYSGKTVAYMCIVRIKSKKEDTYKVCGVKTSWVAELERLSDSNEQLASLKAKLMPKFTKNKKQKGKTIQVTEDFEIIVPRVLINQRFYDNGQEITLGSATYKHNEQELMLNKKAVKLLNGQLSLVEAETLAPQVYDEILKQVMKYFPLYDTNQFRTKLKMGKEQFIKLPWKNKWDGNKLIHVGQQTVLDRILIGLHANAAVSDLSTLKVTTPFGKLQQPSGIALSLNTKIIYQSPTGLFERRVALRGL

SEQ ID NO: 910 - protein, 1352 aa, Lactobacillus gastricus
MGKRYHIGLDIGTSSIGWAVMDDDFKIMRVKGKKGIGVRLFEEGKTAAERRGHRTTRRRYSRRKWRLNLLEEIFDPEIAKVDPTFFARLKESNLSPKDDRKQYSGNLIFPEKAKEEIREWTEKYPTIYHLRNALMTENRQFDIREVFLALHHIVKYRGNFLFNGNFQTGEVNLSDRFDDINSAFISACGEEEAPQIPSELYNDIQELLFDKNTRKLDNQKQLATKLSQDNDKDWSTQFSKALFGYKTKFKVVLQSNEDLDDFQLDSDDADDKIASISEQIDDDRGSILDNIKILYSRITLNEIVPDGKTLSQSMIEKYNLHRDHLKEIKDQLKHTDNWVKFDDLYSQYVNGKLESDRHKKLSSDDFYKKVLTLFDGELKTRVKEWQEKGEFLPKQRTGSNGVIPHQLHQNELDQIIENQSKYYPWLATLNPNEKRQRVAKYKLSELVAFRIPYYVGPMVTKDQSDFAWMVRKSDEKEITPWNFDQVVDRDKSAEEFINRMTTKDTYLIGEDVLPAKSLLYEKFTVLNELNNIRINGKPLTTDEKHQVYRDLFQNAKSISTKKFHNYLVCKLNKPNHLNITGFSDLTKFNSSLDSYIDLKKIFADQIDDQSLQDDFEKMIRWSTVFEDKQIFERKLSEINWLTDQERSEVAKLRYRGWGRLSKRLLAGIHDENGQRIIDALWNSPKNFMQIQAEVAFNKQINDLNTKELSDNNVEDVLADAYTSPQNKKAIRQVLLVVEDIQKAMHGDAPTSISLEFAREEQESSRTRSRRAALSATYRQISDEIVSATVKGELGKATSISDRLYLYFTQGGRDMYTGEPINIDEISRGYEIDHILPQSFIKDDSLDNRVLVKGAINNGKSANYVMDQSWAPDRLAWWKKLLDNRLISRKKYQSLTLTPGKINKYSQNGFINRQLVETRQVIKLVANILNDQYSNDDTKIIVVKAALNSQLRGFLELFKNRNINDYHHGMDAYLSTFIGNYLYKKYPKLRSYFVYGEFKKFSGKQNLKSFNFLHDLEDDSINIISNDDGEIVGNHHEMIEELEKAYQYKYMLVSREVFEKTGDLFNVTVYSRKAKKTLIPIKQDKPINIYGGYSGNNDAYMAIVKLPGKKGKPDTYKIVGIPLRFAGELERAKQLGESAYREKLSAVITPQFTKEKKDRKTGEITKVVDDFEVVLDRVPYRQLFKDSDKWFMLGSAAYQYNAKQLVLNNDDVKLLNEQGRKKLELPNEKLSSALNDVFDHIIQIMNSKFGLYDKNGFRTKLTEAASIFYDLPLRAEYNGNKKVTDGKLEVLDNILIGLHADPSFGNLKQLNMSTPFGQMQTKGGVVLNGNSTLIYQSPTGLFERRVKLKDLSK

SEQ ID NO: 911 - protein, 1131 aa, Lactobacillus saerimneri
MNSKINVPVSIGFDIGISSVGLAVIDAKNGSVLEAVSDIFSEGSSEDNKDRRSARHSRRSSGRKNTRLRDSQRLLQNIGFIKGDNVKLAFREIAYANQKVYELRVKGLTECLTKDEISAVIQHMIKRRGVSYDLKDYEDEEESKKTSNYKASVAINQQLLKTYTPGQIQLDRLHKFGKVRGMVESDGNVTLRNIFTTTAYALELEKILRTQQKYHPELTDDIIDKFLKILKRKRDYTKGPGSKKSLTNYGIYKTDGRVLDNLYEELIGKDKYFPTEQRAASNTYTAQYFNMLNDLNNLRILNSEDGKLTFNQKKNIVDEILNSDAARLDAFKVIMKVTKANKNEITGYRIDAKSRPLLHSMKIYRRVKREMASLGISTDQWSDKVNINGEERIFWDDLAYIISLNDESGELRRRIIRELKYNYEFVDNKLVDAIVDNKKLFAVDSGNKWHNFSLKTMKLLIPELENTSKEQMTILTDLHLTKKDKIDYRLKNKIDVDHILKDIYDPVVKRSVRHAIKMFNVIVKKYTNIEYVVIELPRDRNSTEKKKSIQKFQKDSFNEKDLAMKAFADKLGKSTKELDVFFHKNRKLATKVRLWYQQEGRCLYSGETIPAIELLNNSEAYEIDHIIPISVSFDDSLNNKTLCLGEMNQRKGNRIPWAMFNDGFGQGYTQMCHMLKNNKRLSKQKKHNLETRIDINDLETRKRFIARNLVDTRWASRVVFNELQDFVKAKGLATKVSVVRGKFTARLRREWQIYKTRDTYYHHAKDAAIIAVTPYLDIWKKNNYKMVPKQVGEGMVDIDTGEIISENKFNSYMYREPFTGFVKNVRRMDRVIKIKHTADMKMNRKLSDATIYSVRDVKLSSDRKNEPYRLGKLNIYNLKDYKTLKKLITKTPDKILMYHHDPKTFAILQEIMDIYPDKIDKKDVSPFELYRRENGKVRKYAKKNNGPEITEIKYYDKKVNSCIDITPEDAKNKRSVLLSLKPWRSDVYFNHTKNNYEVIGLKYNDISEVNDLKGIKREHYNQLLRKQVGNDKVEFCFSLYRNSIIKVINDREDIELRFGSSKTQRNKVILKPIDRALFNSYEAVKIYRKASNAGIIERSFSKPGYVILKANIDELGNRHYLRKEEGPKDIL

SEQ ID NO: 912 - protein, 1362 aa, Lactobacillus hammesii
MNQEPYAIGLDIGTSSLGWANADMDGYIARVKGQTGLGVRLFEEGQPAADRRSFRTTRRRLSRRRWRLRLLREIFDEPISSIDPNFFARQKASSISPKDDRFETTYQLFNDKTDQEFYSKYPTIYHLRWALMTEHRKFDLREIYLAVHHIVKYRGNFLRSGNPKSFKPSELDFSQRFKEVNGLWHLIFDEVAPQLPTDNLEEITKLVLDTTRTRADRQRESVKLLMAATDNHKDWKPYLTEFTKAILGLKTKLYLLTGVDVAKADQKTWTFSLEDIEDHRADLETAFDDRSLELIEKLVDLQAAIQLTEIMPSGQYFSQSMIYRYDQHKEHLRWLKDYAEQQTDANKRKAVRLAYDHYIEGDAKGKPEIADDFYKELNRILKGDTSELAKKINHEIALEHFMPKQRTKENGVIPYQIHQQELDSIIDNQKKYYQFLGEDNPVVSHHGSQPYKIDELVSFRVPYYVGPMITADQQKKTAAGQFAWMVRKDSGDITPWNFDDKVDRTASATNFIQRMKTTDTYLIGEDVLPLQSLTYQKFMVLNELNNIRINGELLTREQKQRTYNDVFKGHGTVNVKSLIKSLECHSEVTGAIKVEGLADPKRFNSALTTYRDFKKILPVAIDQPQRQADIERIINWSTIFEDADIFKAKLQEIDWLTDTQRDRLSTKRYRGWGRLSAKLLLNIKDTQGLSIMDQLWNTQHNFMQIVHEPDYAEKIEKTNAKGLKQQDIFETINEMYTSPQNKKALRQILAVVRDIQKAHHGQAPSRIFIEAARGAEQNPQRTRQRQKQLADLFADQAKEIVNETVAQELNDETDNKARFTDRLMLYFLQNGQDMYTGEKLNIDKLSTYDIDHILPQSLVKDDSLDNRVLVSKVENLKKNDHFASELYARKMQGTWELWRSAGLISARKLKHLLMRPDEINKYATGFIRRQLVETRQVIKLVTDVLSNEYDSDKTKIISVKAGLSHQLRMELDLPKVRELNDYHHAFDAFLAVRIGTYLLKRYPKLERFFVYGQYQVAPQLDLRRFNFIHDLVSGKQEKIVAEETGEIVWNREKDVSYMKHLLSLKHLLVTHEVKEDHGALFNQTIYKAKKDNGNVGGKMKLLPTKSNRPTEIYGGHSSQAIAYLAIVRVNGKEPSYRVMGVPIRILDQLKQAKKQGEYAERLALKQFFTPDFTKGKGKIVSDFDVVIPHIPLLQPVIDEISGQSHRFALGTNTYYRNLQQLILTLADQKVLISKETGVDEEKKLVEVYSHICQQVMKFFPLYDRNKFRELLVDSRSHFEQLPIVNRYSDAGKLEIAGKRGILQQIMVGLHANATPGDLKELGVKTPFGKLQVPGGIKLTENAKLIYESPTGLFKREVKITTE

SEQ ID NO: 913 - protein, 1316 aa, Lactobacillus apodemi
MLQKNYTIGLDIGTNSVGYAVINDNYKVPAKKMKVLGNTDKKTIKKNLMGVLLFDAGETAATTRLKRGTRRRYTRRRNRLRYLQEILGPELAKVDANFLHRLAESSLVTEDKEFSAYPIFGDREEELLYHKTYKTIYHLRSALANKDEKADLRLIYLALAHIIKYRGNFLIEGEIELSDTDIDKVYADFCRSFNELFDTEVLQEIEVEAIFKDKTLSKTKKAEELVKVSGVKKNQVAHQFLKMMVGNTVNFKKVFNLTEDQKLSFGTDSYEDELNDLLAKSDDRYLDVFVAAKKVYDTAILANILNTKNSVATKTIFSQSMIERFKDHQKDLKELKQLFKTYLPEKYPDFFGNSKEDGYAGYIEGKTNEEKFYTHTKKILKNIPQAASVLAQIDVGNYLRKQRTFDNGVIPHQIQLKELLAIIENQGKYYPFLLENKEKIAKILTFRIPYYVGPLARGNSRFAWLKRVGKEKITPFNFENVVDLESSAERFIERMTLNDLYLPEEKVLPKHSMLYEKFSIFNELAGIRYITDNGEMKFLDAQTKQSIFELFKQERTVKEKKVLDLLKTLMPSERVVAIKGIDNGKFNASFGTYHDLSKMGFKTEKIASESNQARWEEIIKTLTIFEDRKLIKSRLRKYDDFLNEKEIGALSKRKYTGWGRLSAKLIDGIYDKKTHQTILDFLMNEDYNQNFMQLISNDNYSFKKIIEDSQVIKEEGSLTEVIQELPGSPAIKKGILQSIEIVDELVKVMGGNPKKIVVEMARETQKTHGTTRREARIKEIIKNLNKLKLNELPKDLPSNEELSDEKVYLYCLQNGRDMYTGAPLDLDNLSQYEVDHIIPQSFLKDDSIENKVLTAKIENSRKTNGLPSVEIAKKMGAFWRSLLKVGAISEKKYRNLRRSLHGGMTEKLKETFVKRQLVETRQITKYVAQILNSRFNEEKNEDKVAIVTLKAQLTSQFRKDFELYKVREINNLHHAHDAYLNAVLATLLMTSFPELEPEFVYGKYRKTKFKGLGKATAKNNLYTNILQLLKEESAQYWDTKERDLATIKKNVYQAQVNKVRKVERQTGSFYDETVAKKSASQKLFPRKNGLDPVKYGGYQRANEGYSLLFRADMLNKRGKTKSVKTLVKIPIIESAQYLADPTEYLAKRGYYNVSEHSLLLPKFSLLENNNGLRRYLASSNEFQKANELILPKHLVRLLYWSQSKQRKEELNKHRAEFAELFTYIMDFADKYVVAPKNSEKIKNIYENNKDSSVEVLGKNFIELLKYTADGAASDFTFFDTKIPRKRYNSAGDLLDGTLIYQSKTGLYETRIDLGAI

SEQ ID NO: 914 - protein, 1366 aa, Lactobacillus concavus
MDKKYNIGLDIGTSSIGFVATDEDNHVIRAKGKNVIGVRLFDEGQSAAERRGFRTTRRRLNRRKWRLNLLREIFEPHIYPIDASFFMRQKYSNLSKQDPNQKIEFKDILFSDKSDAEFYRQYPTIYHLRQALMTEKRQFDLREIYLAIHHIVKYRGHFLDETPTDKFSFDQLDLTQEFERLNVLFSEQNPEEPFEIVVNQNQSIEDILSNQSMTASDRRKQALVVFYQQSENKENEKQYKAIATEILNLLLGNKAKLNVILAQEVDKEAAKDWSLSLSSETFDDDLEKASSGLNDSQLEMVGIFERIYSSLILKSIIGDHNSLSAAMVDKFKTHAQHRDLLKDVIKNSDATKGEQLQFAYDHYLQRHSADGKAYGKDDFYKEVKKNLDDSDAAQQIQQLIDTDQFMPKQRTKANGAIPHQVQQKELDLIIENQCQYYPWLAEENPNSERHNVAKYKLDELVSFRVPYYVGPLISPADDETDPQAIQNTKFAWMIRKDAQGRITPWNFDDKVDREKSADKFIKRMTTTDTYLIGEDVLPDQSLIYQRYKVLNELNNVRINGRPIEVQIKQNIYTDLFKKFKSVSVKKLRSYLEEMSYYPGSFKISGLTNPGKFDNGLTSYLDYKNILGDSVDANDKRADIEQMIEWSTIFEDNKIFAQKLESMTWLTAEQRKAISRKRYTGWGRLSNKLLTQLKNQDNRSIMDLLWETEENFMKIQSAPDFSKMIEAHNQQFIKNEANIQQVISDLYTSPQNKKAIRQILLVVDDIQKAVGHAPEHIAIEFAKGEDKNPRRTISREMKIQDVYQQISDDILVSPEVRAQLNEKIENRHGRLSDRLFLYFMQGGRDMYTGKPININNISHYDIDHILPQAFIKDDSLDNRVLVSDKLNREKSDTVPRDLFGREMMSTWEKMADRGLITKRKLANLKTIPGSIDAHKAQGFINRQLVETRQVIKLAVGIMIDQYPETQIVSVKANLTHEMREMFDLVKNRDVNDYHHAFDAYLTAFVGNYLLQRYPKLEPYFVYDKFKKLKDQNISMRDFNLLYDLKKNEDVYDQRTGHSAHKIWDQHGSIDYIRHLFAYKKILVSHEVHQNGGALYNMTVYGKADDAKRKLIPIKADKPTELYGGYTSRKLAYMAIVKTKKGKKEQYQVTGVPVSALTTLRQFKEDSPEQKQALEEIVRRNFDEKTEVEIIVPKVLFNQLIVDEKCRFMVGSDTYRYNAQQLVLSADDLEIINASHKDIQTIDSSDYSQQLDQVYQNILTIVDKHFPMYDINKFRTKLHDIYEQYIELPNEDVWENNKLTTLGKHTIIIRILQGLHANATVVDLKQLGIKTPFGFMQQARGIVVSPDAQLIYQSPTGLYERRVRLGDL

SEQ ID NO: 915 - protein, 1366 aa, Lactobacillus composti
MTKDYSLGLDIGTGSVGFAALDTNYRLLRAKGNNVIGVRLFTPAETAEERRGFRTARRRLSRRRWRLGALNGIFAPELAKVDPNFLHRLKYAWVHPADQQNKGKYSAAPLFNDAALDRQFHDDYPTIYHLRLKLMTDTSQHDLREVYLAIHHIIKFRGNFLRGEGPINASEAFDINTFIDQMTAFYDQAFPDFKIVDQVDQQIIFKGLTDMTLSPADRANKALMGFNNAAQQPNKRIFKAILSGLVGNQVDLMAIFQLDGIPKEDQKEFKFKFVDNDIEEKLAALGDNPALSDEQNEFLTTLYAAFSGLTLKGLLGDATSISAAMVARYASHRTDWTYIKDHVLTPQNNRELRLAYADLMTDNEDVRLKAGKKFAKAIEAADIPAAKKSEFSLKIDNNEFLPRQRTKANGTIPHQLHLNELQQIIENQGQYYPFLKATFEQDGHTLNKIEGLVKFRVPYYVGPLVPKHKVAGNNANHWMVPKEPGAITPWNYTEKVDRDKSGNEFIRRMTGTDTYLLGEPTLPKNSLVYQEFNVLQELNNLRIEKRRLDIAVKQDIFEHVFKTNKTVTVKRIEEYLTTEFGSPVTLSGFANVNERKLNSSLSTYHYFVGIFGAEFVDDPKNLTLLEQIVELQTVFEDRKALQRQLKLRPELSEKQVKQLARTHYTGWGRLSQKLLTSKIVHVALEGEREPGQYSILETLYGTQMNFMEIVNDMKDRYGVKSWLDQENSGSENNLSLKQRILDMPGPKNIKRGINQAFHIIDEITRAVGNAPSRIYIEFARESQQSNLTNARVNRLKQLYSNQALKKEFAKLASEIKDLTKEQLKDDRLYLYYLQQGKDMYTETDIDITKISSNYQIDHIIPQAYTKNNSLDNRVLVNSEMNARKSDSPTFLPSLIQERKAWWRQLRDTGLMSTIKYNNLTRTSDDFSADQKERFIARSLVETRQVIKNVATLIKEYYDDSQVEALPSEITAEMRRYLNVRKNRDINDYHHAHDALLFATAGEFSRKVGIMEKGRVSDGAGNIYNRYTKDIIQRARAKAGQDKKVRPFTFIVGSMANPDTKFQTNQTTGEIVWTPEDVAYLRKVIDYKKMLVTKMTLDQTGTLYNETRYGSGDKHVAVALSKDKAADLYGGFGSLKPAYAALVYSKKKFRLVNVLRLWLPEIKKNASVLERKVQSVLGDDNAKVIRAHVPCGQLLIKDGALVTVSSATELHNFRQLWLPKADYQDISILLGAPDKVTAENRLQAESHFDDVDQRFESLLKDVIDQARQYYPLKTHQTSLEKLIGKIGKFDELKFAQKQQVFSRLLSALHANATNSDLKQIGLSTAWGRLIYPKGVSLTDEDKLINSSFTGLFNDVMSIKEFHDFSIN

SEQ ID NO: 916 - protein, 1064 aa, Veillonella sp.
MRHILALDMGTASTGYAIIDENYNVLITGVRLFREGTAEENVGRRRFRSSRRGVRRSRHRLDRLKELLTNVIGVSGDQSYTNLYEIRARGLNNKLSPDELIAAIIQLAKHRGIFYLSPEDLAAEDGSGQSSADIIRTNEYKLKEGVYPCHVQLEKLNTTGIVRGIENKFTHESYRNELIKLLEVQSEFYPKLKGIINDILCIYDSKREYYEGPGSYKSPTPYGSYQLDESGNVIKINLIDKMRGKCTYFPDELRAPKWSYSACLFNLLNDLNNLTIQGMKITEAQKQELISEYVNKGKSVTIPAIAKVCGVKKEDIFGFRIDKKEKPIFTKFEGYNELLKIAKSVNEEATIEGNKQLVDDISEILTKEKSIEIRKKTLIDDLNLSVNLSKEIAKLGDFTKYHSLSFKAINLILDSLLKTSKNQMELYTEAGIKPYNHNFSQNNQLSANLSDWIVSPVVKRSINETIKVFNALRKYLKTQMGEDAEFSDVVVELAREKNSQEKKDLIKKIQKANEEKRYKIMELVENRRLTRAEFERISLLLEQDFKCAYSLEPIELADVFKAGLLEVDHIIPLSISLSDAQSNKVLVYQRENQAKGQRSPFQYFCSGKAKITFERYKEYVTKNLNFSNAKKSNLLYLGNPVEDMKGFIERNLVDTRYASRETYNLLKSFFEYHNINTKVKVINGSATSYFRKKAYLSKNREETYAHHAQDAMIIAGFANTKLMKFFSKIGAFSESLNHKDSIVEVDGNIINSETGEVLEQELFDKSENVSNYIQFLKRIESIEPLYSHKVDRKPNRALYDQQIKATRSFVEDNKEVTYIITKYSDIYNTEKGNSGAKLKKRILESPEDLLMYHHDPKTFEIFLKIVEQYGEEDNPFAAYKEDHGPIRKYSKKGNGPIIESVKFREKQLGSHRVNTKQNGHNKSVFLKIKSLRTDVYQDGENYLVLNVPYDMVSFVNGRYIIDQDKYMKAKQAQKIPESARFVTSLYRGDYIAYEENGELVECIFKCINNEKAHRIEISYVDRPTDKQVMKGIKTSIKNLTKYNVDVLGNKYKVTDEKLEFDVTI

SEQ ID NO: 917 - protein, 1013 aa, unidentified
  source 1..1013: note = Cytophagales bacterium B6
MKKILAFDLGVTSIGWAYVLEAENPGEESSILKLGVRVNPLTTDDKDDFEKGRPVSVNAGRTLKRSMRRNLQRYKQRRKDLIALLKENGIISDTTILTEEGKLSTHATLAARAKAVTEKVSMDEFARILLMINKKRGYKSSRKVNSEDEGQLIDGMAISLKLKDEQITPGEYSLQLLKEGKKSLPDFYRSDLVAELDRVWNFQQQFYPDIFTDAFRKNIQGKGQKATSAAFWGTYGFNTAENKGNWAERKLQAYQWRSDAVSKQLSAAEAAYVVTEINNNINTSSGYLGEISDRSKELIFNNETIGQYLYRRLQHERIGTKNQVFYRQDYIIEFDTIWNTQARFYPELSGELKEKVKNTIIFYQRKLKSQKGLVSFCEFESKEVEAVKNGKTEMYRIGAKVCPKSSPLFQEFKIWQNLAHLQIQHKKQKEARYFDLEAKKLLFYELNIKGNLSKDEVLKLVGYSSKDWELNFTTIEGNRTNEALYQAYFKMMELEGHDEIEWKKLPADEIKATIASFFESQGLATNLLNFDAEITGSNFEQQASYQLWHLLYAYESDDSKTGNDKLYQLLQQKFGFNKSFAQILAKVGLQADYGNLSAKAIKKIMPFIYENNYSEACKLAGYNHSSYLTKDENDLRPLKDKLDLLRRNSLRNPVVEKILNQVVNLTNTLLATPGLGRPDEIRIELARELKKNAKERAEATSQINKTKNEHDAIRIMLMKEFNIKNPTRNDIIRYKLYDELKFNGYKDLYTNEYISREELFTAKYDIEHIIPQSRLFDDSFSNKTIVLRAINQKKDNATAFDFIQNTYDDNALSEYKLRLEAFVKFYPERKAKYKKLLLQGAAIGQGFIERDLRDSQYIAKKAKVMLEEVCRKVTSSSGSITARLREDWGLVNIMQELNIDRYRGLELTEMVEMKDGNFKERITDWTKRDDHRHHAVDALVVAFTKPSFIQYLNNLNARSRNDESGDTIWRIQQKETQIDADGKRRFKLPLLHFRSIAREHLENILISYKAKTR

SEQ ID NO: 918 - protein, 1084 aa, Sporolactobacillus vineae
MKYSIGLDIGISSVGWSVINLDRERIELMGARLFDAAENPKNGSSLAAPRRDARSARRRLRRRRYRVGRVRHFIIDRGLVTRGQADQLFDWKDGDLDIWLVRVNALERLLTDREFARVLIHIAKNRGYRSNRKSEAKSGENGQVLSAIKANKELMEEKGYQTVAEMLVNEPETFAGRKRNRGGEYTHVIARSELEHEIRLIFTKQRAFGNRFATEENENTYVKIWAAQRPVATKDDILKKIGDCTFEKGEKRAPKASYAFQYFRALDKLNRLRILSVREPSRNLTDDERNLIVPALFNHDKQKYSDLRKILQLRDDQKFNELFYDPGKSLKENENKTFLSLAEQYKIRKVIRDVQGKDGLLQYRPLDIDTIAYALTVFKDDQDTRDYLSNTFVNGNGKQVLNLANRAFDAELIDGLLSLSFAKFGHLSLKALHKLIPHMEQGLSYYDACKKVGYHDNEQVGKSKQHLLPVIPADEIRNPVVVRSLSQTRKVINAIIKRYGSPTFMYIELAREMGRPYNERRDLEKQYNKNRTVNDSAIEQIHELYPEIGAPRGHDILKYKLWQQQDCKCAYSLEKIPAEKIFEPGYAEVDHIIPYSRSFDDSNSNKVLVLSRMNQEKKNRTPYEWFGGDEHRWNKFESYVNALKVNRKKKSLLTKKNMDTEEEDTFKSRHLNDTRYITRFIKSFVEDNLLFREIEGAKQHVFTVNGAYTSLMRKRWGFNKNREESDLHHSVDAVIIAVSQPFRNEVSRYFKHREISLPQLLKRTWDYFPEPWEGFVKELRARTLQDPEKLKLALESLDLDSYDPEFIDEVKPIFISRMPKRSIKGQIHDETLRRNRGKTKDGFVKIVTRTRLENIKFDKNGDFPMYGRESDPKTYQAIKQRYLENNKDKKKAFIEPLYKPAKNPNNASLIRSVKIEDKANQIVPLRDEAVAYNASIVRTEVYRNKETGKFYLAPVYVSDVFAGREPRRFIRANVPYEQWVNITDKFTFLFNLYPNDVIYIKMKKVKTTKSNINKTISWQESYFYFKGTDIHTGAITIIDHMNSFTDRVGTQGLQLFEKYQVDPLGNLSRVHGETQYGVPALSHS

SEQ ID NO: 919 - protein, 1497 aa, Prevotella baroniae
MKTILGLDLGTNSIGWAKVSVDDHGNYLHDIKLGSRIIPMSQDILGNFDKGVTESQTAIRTGFRSVRRIRERSLLRRERLHRVLHVMGFLPPHYDSAIGWNREEASTYGKFLNHGEPKLAWERLEDGSMRFLFMDSFHEMMANFARHQPALVADGRKIPLDWTLYFLRKKALSQAVGKEELAWILLNFNQKRGYYQLRGEEEEENPTKREEYYELKVVSIEVAEEGKGGNTWYRVQLENGWIYPCPSKIALDDWVGKIKQFIVTTEYEKDGTTLKKDKDGEVKRSFRAPDENDWGLRKKRTESQLEDSGKTVGAFIYDHLLAEPVDKIRGNFIRTIERKYYKQELEAILREQSKHHEELQSREMLAKCAEELYQSNQPHRDSLMKKDMVYLLLTDLIFYQRPLKSKKSLIAECPYEYYKYKDKEKGKKKRQGIKCVAKSNPYYQEFRLWQFIVNLRLFDRTDDKEVTAEYLRSREDYARLFAYLNDRKEINQETLLKDFFGLKKVKIGAEKEFAIRWNYIEDKEKKYPCNETRHELLLALDRAGMDRSWLDDSELQYRLWHLLYSVEARDEAEGALHKLRDDDEFAGAFLKVKPFKKDYGAYSEKAVKKLLAVMRMGSWWHEEDICKQTRDRIERIVQGDIEEKIRERMGHAAYSFSHLADFQGLPEWLACYVVYGRHSEATHILRWDSPDKLLSYIKGFRQHSLRNPIVEQCILETLRTVHDIWKEAGHIDEIHVELGRRMKSTAEQRAHMTKNILRNENTNLRIKCLLMELKNDADVKDVRPYSPMQQEILRIYEEGALQQLTKDDTEYAEISKISKMAQPSAKELLRYKLWLEQKYRSPYTGKSISLSKLFTSAYQIEHVIPQSRYFDDSFNNKVICESEVNTLKSNMLGYEFIKNHGGEIVHCTMLGDVKVFSESEYKTFVTEHYSNNKYKKEKLLLEDIPQEFLNRQMNDSRYISKVVKGLLSNVVRTEDELEATSKFVVSCTGGITDRLKKDWGLNDVWNSIVYSRFERLNRLTKSENFGHWENKEGKRVFQTSVPMELLPGFNKKRIDHRHHAMDALVIACASRNIINYLNNEFAKSPKQREDLRQLLCEKNRIIRKPWETFTQDARAALEDVVVSFKNYVRVINKATNYYERYDADSKKTMVPQKGNEMWAVRKPMHKETVFGHVNLRRKAVVKLKEALENISSICNKELRDYINVLVDKQFNTKQLLAHFKSTDYRWNKQYIDKVEVWRFSDEKEPMVATRKLLDTSFDKKRIDAITDTGIQKILLNYLEAKGGDPAITFTPEGIAEMNQNIAVYNDGKKHQPILKVRVAETMGEKYQVGETGNKADKYVEAQKGTNLYFAIYEDEEGKRSYDTIPLNEVTERLKQGLSPVPEKNEKEVPLKCYLSPNDLVYVPREENGNELDKERIYKFVDSSGTTANFIPHRSAGLIYNVDKKIAESFCNGTIIQNEYGVGSPQSKNQKSLTGEMIKAVCWKLDVDRLGNILRVIK

SEQ ID NO: 920 - protein, 1431 aa, Prevotella nanceiensis
MTQKIFGIDLGTNSIGTSVRNTDLGNNLVDQLEFFSSDIFNASVSKNTNGREYSLASDRSAHRRGRRLNDSRRRKLWATLDLLIKNNLCPMAPESLEQWRTYDKKKKLFRQYPIDDKAFHSWIILDFNGDGKPDYSSPYQLRRELVSVQLDFNQPIDRYKLGRALYHIAQHRGFKSSKGETIAEQEKQEDDSKKNKNSALTEEHVDVVNAMKASEEKLSKGLLAYMQEHNLKTVGAAFAQLEDEGIRIRNNSEYKAIRSQHQDEIKEIFKFQKGLSEQTELLDTLISEKQGIGTIFYKRPLRSQRGNVGKCTLEPNKPRCPIGHPLFEKFRAWTFINNIKAKSPDSDSAEPLPMDMRINIYNKLFLSRVKADFKFEEIRHFIEKQWGVALSKDDKTINYRDDTSVAGCPITARMIKVLGEDWENFQVIGTKERQTQGKSNNALHQVCYTAEDVWHLCYDAEDPEQVRVFAEQTLGWDEKKAAELVRLWSAIPQGYAMLSQKAIRNINRMLLFGLKYSDAVLLAKLPDILELLDEDIQTIIKKAQQLEEVVNEEKRIGNIVNSLIANYKAESLEHRFADHNYEYQLDESDEREIIKHIESNIGKQRWELMDADEQISILEGVRSGYQAFFASYKRNYIELPQLGERLVELLSKEYPSVEKREWERLYHPSQIAIYRPILLDKSEQNLRLGDPNIGAIKNPTVMRTLNNLRRRVNQLLDDGVLVPSETRVVVETARELNDANAKWALEKYQKTRRDENAQIKKILEEFYSKPNGITDTDVDKARYVIEQCEEDNYKSKKEIGTYSKDIQKYKYWLEQGGQCLYTGRIISLSNLFDSNAFDLEHTIPASVSFDNSDQNMTLCEAHYNRFIKKNNIPTAMPNYEKDVTIDGKLYTAIKPRLEKWKKRIERLSRNVEYWKVQARRAQMKDRKDECTKEKLLWQMELQYWRDKLQRFTILEVTDGFKNSQLVDTRIITRHATLYLKSVFENVEVQRGSTTAEFRKILGVQSVEEKKDRTLHSHHAIDATILTTIPTAAKRERILELFYKVQEKERILKNCSGDVCEGLKQDLEGLQAKLKKEVADCKLGGEISQLGNFINDKIIINHCVKDQTLTPSHKRLRRRGRVVGGKEHPIWQTGDTLRGEIHAASYYGAITQYAKDKDGNVLFNDGKPKIDPTIWYVIRRELKHKKSPQDTGFASWDDLEKVIVDKNLFKLMKEQFPEGTSFKDACEQGIYMIKKGKNQEHNIKTHRIRHVRCYAVKTALKIKEQTNKSTKEYKQYFYAAVGDLYTMCCYTNGKNKEYRIYSLYDIAQHRKAGIEDIPEFITDKKGNRLELAYKLRKGDMILLYENTPEELYDMDPVNLKRRLYKVNGFENDGLRVRMTNHMVANKEMGESIKDYSQIPVAARCGIKTIKFLIMGEHNDFVIKGNNIIFNHR

SEQ ID NO: 921 - protein, 1210 aa, Prevotella saccharolytica
MKLVLGLDLGVGSVGWALIFITDSGEPIKILALGERIVSMDPDNSKEFSAGATCTLNQKKTKAKSVRKGYSRYVQRRDALTAELRHIGMMPDETLIKLPVLDLWQLRANAATEGKKLSLAEIGRVLYHINQRRGYKHGKSDVSSDNKQKGYVKAVNERYCMIQERQQTIGQYFALKLKETAVTTEKGTFYTFRIKDQVFPREAYEEEFDRIIECQKKFYPELLTEKVIDKLRNYIIFYQRHGKSCKHLVSVCDFERKPYKDENGKVFYNGPKVAAKSNPLYQIEKIWEEVNNISLRNKKGEELEITLVQKRELFNYLNTHEILRLTVLYKILGISKRDGWSANDAVKRGLKGNTTFVQLQKALQGVEDCEELLRFQLNNMPTVVCDEVTGESLQMVNPDCIGQPLYRLWHAIYSLKDKRQLKDTLRKNFKIEDDEIIDLLYNIDFTKDGYGNKSVKVIRRLLPYLQAGLKYNEACEYIGINHSNSLTKEENAQRVLLEKLPQIGKNELRQPIVEKILNQMINVVNAIIAKYGRPDTIRVELARELKQSKEERKLMSDGIAAREREKKRDGKILEEEGIHPTKNRLERYRLWKETGERCLYCGNGINLNEFLRGGEVETEHIIPKALLFDNSYSNKTCSCRECNRKKGRRTAYEYVSSLGEERFEVYLNVVKMLYDEGKISKKKMDWLLMKSEDIPQDFINRDLRQTQYISRKAMELLQKVCYDVTVTSGHVTSFIRHIWGYDTILHKLNFNRYKQGGLTEVVQFEHRGGKHEREVISGWSKRLDHRHHAIDALVIAMTKQSVIQRLNTLNTCRDEMYQEVESEKKEWRDDYSLLEQWLRELKHFSVEEVQRVIAKTLVSYKVNKKITSPGTRAVYSKRKKKVVQRGILIPRGVLHEDSVYGKIKIQGDLDPVYVIKYKLGVGAMGFVFTGKETYEETIKSNKKTGLEEVKVKDDIGNTLMSIVDGNIRNRIKQRLNIGFPEGEDYRNNPQKALENLKDLDNYPLYADDACKIPIKSVRCRTGLSAVVPLRYNGEGQAVGFVKTGNNHHVAIYRDRDGGYHESIVTFWQAVSRKRFGIPAIIEQPPALWESISSGLQREIPKSILETFPEPEWTFIVSMQKNESFILGMEEDDYQRAMEEKDYAALGNNLYVVQNISSMVYRFCLSTTTIFDSQKMNKPDKRFLNIQSFQAFFDKNPHKIKIDLLGEIVNN

SEQ ID NO: 922 - protein, 1130 aa, Lactobacillus nodensis
MENKISLGLDIGVASVGFSVIDAQEGKVLELGARLFNSSVSAENQTRRDMRGSRRLSNRKKQRRKDVAQLFKTFGLINYFDKENYFDNFQNNLNSYELRVKGLSEKLSKEELVNSLYHIVKRRGISYDLADADTDFDGSDYSSSLNQNQLELQTKTPAEIQLTRLNVHGAVRGKVTINGEDEDTMQVLLNVFPTKSFVSEAKKIIQTQQQYYPDILTDIFETKYLEILERKREYFVGPGSEKSRTDFGIYKKDGRTLDNLFEELIGHDKIYPDELRASGASYTAQVFNVLNDLNNLRISSYENGKISTEDKIKIVEDLRNNIGNVIIMKIIKKVAGCEDDDIKGYRLDSKDKPDIHSMAVYRKVHRDLLKYDVDIIKWPTEFIDELSPILTLNTENGEIRKQMVNKLQPKYSFLTDELIQVIINNKSSFDVTSNNKWHRFSLKTMNVLIEEMFRRPVEQMTLIQELGLIKDSGKRFENCKLLPYREISKDIFNPVASKSVREALKIVNAVMKKYGQIDYLVIEMPRDKNEEEMKKQIEKFQKENNKQKDEAINEFVKKIGNKNAVDDGLRRYGGKLYFKIRLWYQQDGIDLYNGKVIEPFDLLNNINKFEVDHIIPESISFDDSINNKTLCYADMNQIKGQKTPFEFMNEGHGQGFAKMKAMVNKNSKLKGKRKNYLFDENISDIETRKRFISRNLVDTQYSSRVVLNSLQEFFKEKETGTKVTVVRGKFTSNLRKHWHINKTRDTFHHHAIDASIIAATPFLRIWKKDASLFPMHVSENTVDIETGEILNDTEFKKDFYGLPYSSFIEELNGADDRIKFSHQVDRKMNRKVSDATIYSTRKGMLNKDKEETDYVLGKIKNIYDVSEYNKFKRIYDKDPNKFLLAHHDPKSFDELRKIMQEYPSKIDKVMTNGKVKSVDISPFELYRRKHGMVQKYSNKNKGPVIKQLKYLDKKLGSHIDITPKDTLNDRHVVLQSLKPWRTDVYYNSVTGEYEIMGIKYSDLKFNGGEYGIKMSKYLEIKEREQVSDESEFLFTLYKRDRIQIINCENDEIVEMLFWSRNNSNIGYAELKPVYKYKTEDESWPVYGYGKNQILKRLVPKNCKILKVNTDILGNPYYIKKESKNPKNILD

SEQ ID NO: 923 - protein, 1135 aa, Tenacibaculum maritimum
MSTILGLDLGTNSIGWALINNTTSKIIGVGSRVFSEGVVDLGGGEGKEMSKNASRTVARGVRRQLFRRRLRKRYLLKELAKHQLCPIAPEALENWNQTTVFDTEVLKKWFQLNPYELRAKAIKAPISLHEIGRIFYHMIQRRGFLSNSRSAGAATKETSAIFKGDLKQEKVGIASTQQSIAQSITLGSYLHTIQPKEHAPYVKKVARIRNRYTTRQMYIDEFEMIWEFQKQFHAVLTNSLKTHLGGRKKDGYKKDGILFHQRPLRSQKHLVGNCTLEPKKTKASISSIPFEYFRIYQWINTLACDFNGNHHPISQKERHQIITLLLSAEKVAFKKIRKAIGKTEKEYQFNYKDDAIIYGTHTISNLSNKKFFGKQWFNFTQEEQENIWHILSFFDDREKLKNYAMTHWQFTEEKAIKISKFNLKEGYANLSRKAINGILPFLKEGFMYDVAVALAGVKNALGNTWQTHQEFVKNNVPEIVRANIKGGYLAPLKKMLAATLACTPTQLKKLYHHSSAIKATTIAPKLPVGDIADKEIQKIKNPIVIKALFEVRKLVNELITTYGKPDEIKIELARDLKTSKKNRYEIRKQQQFLEKENNRIQKELENLAQRATPTNILKYKLWEECNHTCPYTNTKIPIHKLFTGEIQIEHIYPWSRSLNDSFMNKTLCYANENRAKKNKTPYEFYHDEQGEEKWAQVKQQALACFKNKYPNYPNAYNKFKHFVQKKREEDFVSRQLNDTRYISKEAKNYLSKISNNVLVASGQATAALRHHWGLNSILNEVENAKTRHDHRHHAIDALVMACITAGHVQALSQWNRYDRNYELKDFAMPWPSFRVDAAVAIAGILVSHKKEKKLLTVRKHTVIKNGQPYTNKGIAARGLLHKESVYGKRKAPGKEEAYHIRKPIESITTEKKLEKVVDPTIKNLIFKRIQKLGGFVKGKIPSETFYKLAENGQRVPQIFLPNKNGAPVPIKKVRIREVIGKAVPLKNTVNQYVNPKNNHHILIYKNAKGIMEEEVVSFWEAVERKKQEIDVFKMPKKGKEKLAILQKNDMFVLGLDIETVEEAWQDNSLLKEHLYKVQKISSKDYNFRKHSDARPDEAAKKEYIRITSLGEGKKGWKTMNPIKVKLNSIGKIVKA

SEQ ID NO: 924 - protein, 1133 aa, Methylophilus sp.
MNSKQALKYSIGLDIGIASVGWALLGENRIIDLGVRCFDKAETADKGESLNLARRSARLLRRRLRRRAWRLTKLARLLKREGLISDVNILKQPPAKGFTTPNLWQLRVEALDRKLNHEEWARVIYHLCKQRGFHWLSKAEEKKADDDKEGGAVKKGLAGTKKLMQDKGYRSAAEMVITEFPDAQRNKRGDYSKALSRELLSTELQLLFDRQRALGNLSASSTLEDKLLERKHGLLWAQKPALSGEALLKMLGKCTFEKDEYRAPKASFTVERHVWLTRLNNCRLIIDGEKRALTPAERVLAIQLPYDQSSDFTYKQFRKALVKAGLTNEFRFAGLVYPSQSEQEKAKDPEDEKLIKLPAWQQLRKAMKEANLESEWQKIAVDALDGKAQLYDEIARVLSIYKEDEEVERELNKLDLPNKSCMVEVLQTVRFEQFSNLSLKALYNILPHMEKGHRYDEACLAARYHHSQLHHTGTDEFQYLPLFYSGRDRDGRLKFNEDLDIPRNPVVLRALNQARKVVNALIKKYGSPDQVHIEMARDLSKSFDDRRDIKKAQDEYRDRNEKDRTTFNLEFNTTGELKGRDFEKWQLYREQHGKCAYSLQALDINRLFEMGYAEVDHALPYSRSYDDSKSNRVLVLAAENRNKGNMTPYEYLGGAQNNLRWLEYVAFVNSNKTYRQAKRNRLLRKDFGEEAAREFSERNLNDTRYICRFFKNYIERYLKLADTSDSKRCVVVNGQLTSFLRARWGLVKVRADSDRHHALDAAIVAACSHGMVKRLADYSRRKELETAREGFVDITTGEVANHAMYTQLEQHFPFPWLHFRQELQARLFADDLPALRNELQNMGYGADALENVKTLFVSRAPQRRNSGAAHKETIYGQSEKLAKTGSVTQKIAVTDLKLSDLDKLIDPHRNQKLYAEITKWLKGRDDREKRAKEIEASLGRGKDKRETTSEEKAEIEGLRALPRKPTNDDTPGPVVRTVTAVIDKLSGIPIRGGVAKNDSMLRVDVFSKAGKFHLVPVYVHHRVTGLPNRAIVANKEEGDWSLVDETFDFCFSLYPNDFVRITLKNELREGYYSGCDRATASVSLWVHDRNASVGKDGLVRSIGVKTALNVEKFNVDVLGNIYPAPKETRNDLA

SEQ ID NO: 925 - protein, 1341 aa, Lactobacillus lindneri
MTQKVIPYNIGLDIGTNSVGWAVTDNENKLLHIKGHNGIGVRLFKEGQSAAERCGFRTTRRRLSRRKWRLRLLNEIFADKIAKVDPSFFARLKQSNVSPKDPNKTMFGNILFDNGNLNDKSFHDEYKTIYHLRQSIIDHPEKKFDIRLIYLAMHHIIKYRGHFLNQANVQDFKGGKIDLEESFKDLNSIFENQGRDLRLVTEDANKYVKELSDNSKTRNDRQKELSKVLYIPIDKNSDKNNKKVTTEIIKAILGMKAKFDVIFGIDAENAKEWSLTFNSDDFDDKIEGLSAQMTDEAGEILLILKELYFALNLSDILNNSVTDKNAKTLSEAMINRYDDHKEQLTMLKQVIDNSDKKHAKALKAAYSAYIDGENNKKISFEDLRKRIQKNLDNSETSKKINDLLEHDYFLPKQRSKENGAIPHQLQQQELDKIIESQKHYYPFLAELNPNEKRSRQAKYKLDELVAFRVPYYVGPMVKATENNQSNNGKFAWMIKNDNISDKLKKEEITPWNFDKKVDRTETATKFITRMTTTDTYLIGEPVLPKNSLLYQKFVVLNELNNLKINKQPITPEQKQYVYEHVMKQTKRVSLKKIADALVIKGDYPYAPEITGTTDQKNMNNGLSTYIDLAKIFGDELDDIDRKEDFEKIIEWSTIFEDQHIFALKLKEIKWLTEDQRKQVVKLRYQGWGKLSKKLLADLVDDNGQRIIDLLWDSKQDFMQIVNQNSFKQAIAEHNGAHLEEKDLKDIINNLYTSPQNKKAIRQVILVVDDIIRAVGYEPVNIMMEFAREDSKDHRLTNSRSRQLEKVYKDITNSWFDDDNVKDELKDKIKDKAKFTDRLYLYFTQGGKDLYTGEPLDIDNLSNYQIDHILPQSFILDNSLDNRVLTSKINNQIKKDNLPGEFFGSKMHNFWKHLKELHLISNKKYYNLTLTPNSISKFNNQGRFINRQLVETRQVIKLAAEILHNRYSEENGTNIVTVKANLTHHMREKFNFYKNRNVNDYHHAFDAYLAAFVGNWLLQQYPKLKPYFVYGDFAKTEIDNLKSFNLIYKFEQAHQLNEEDGKIAKDTDALLGYMKNVYHFKKMLVTKELETNHGNLFKQTLYPSHGKMKNLINPKENRSSDIYGGYSSETGAYVSLIKVFKKNKIENKIIKIPLLYIDKLNRQANAKQFIRNFIIKDDSNKFDILSEKIFLNQLVIDGDELFTISGSGDRQNAQQLILSDKSLKILSKNINVISKNDLIIIFNEIIDDICKYMKMYEVENSDETKAKFEEINDKDRMLKIINDLLLGLHANASRSNLSSIGLSPSFGRFFSGNAGIKLSENAKFIYQSPTGLFSRKVKISDL

SEQ ID NO: 926 - protein, 1245 aa, Bacteroides coprophilus
MKKTLGLDLGTNSIGWAVINSNIDSEGKEKLVGISSCGSRIIPMDATTLGDFGKGNTKSPVAERTRLRGIRRLLERSLLRRERLHRVLSVMGFLPEHYASQLDRYGKFLPETEPKLAWYKDDSGRYQFLFQKSFHEMLEDFRQHQPELVAGEKKIPYDWTIYYLRKKALSQEITKEELAWILLNFNQKRGYYQLRGEEEQEENNKSVEYHALKVVSVEDSGERKGKDIWYNVTLENGWVYRRASNIPLDWTGKVKEFVVTTELDDAGNPKKDKEGNVKRSFRAPKEDDWGLLKTRTQAQIDESGKTVGTYIYESLLCMPNQKIRGKLVRTIERKYYKDELRQILVKQSEFHAALQDHNLLLSCIEELYPNNEAHRRLLSASSFIYFLIEDILFYQRPLKSQKGLIDNCPYESHIYKDKKDGSLHHVPLKCVSKSHPLFQEFRLWQFLSNLRIYQRERMMDGSLKLDVDVTREFLPSEEDYVKLFDWLNERKEISQKFLLAYKPFGLKKNEQANYRWNYVEDKSYPCNETRAEIKSRLSKAGVPEEFLTEEKEEALWHILYSISDKKELTKALGTFAAKNCLNESFVEVFAKIPPFESNYAAYSLKAIRKLLALMRMGKYWNEQAIDRQTRDRIEKILTGEYDETIRSRVREKAMLLTDISSFRGLPLWLACYIVYDRHSESKELVKWETPADIDHFLSKFKQNSLRNPIVEQVITESLRTVRDIWKQEGKIDEIHVELGREMKNPAKERARITAQVQENENTNLRIKALLAEFMNPEFEIENVHPYSPGQQEILRIYEDGVLSGIAEKDLPDDITAILKKFRENDVKKRPTTSEVLRYKLWLEQRYRSPYTGRVIPLGKLFTPAYEIEHVIPQSRYFDDSISNKVICESAVNKLKDNCLGYEFIKKHSGEMVELGNGETVPVFSVEEYERFVKESYFGNSKKMKKLLLEDIPDSFIERQLNDSRYISRVVTSLLSNLVCEEGEQDGLSKNVIVCTGGITDRLKKDWGVQEVWNRIILPRFLRLNEITGRTDFTSTSVNGHLLPALPLYLQKGFNKKRIDHRHHAMDAIVIACANRNIVNYLNNSSARKNSEISRYDLQRLLCEKVKTDANGNYKWILRKPWETFTQDVYAALTNIVVSFKQNLRVINRTTNYYQHYNEAGEKRMIPQTKGDRWAIRKPMHKDTVYGEVNLRKEKTLPLRDVVKNPSIVVDKSLKNKLYELLKSQYDLKAIAKYFETHQDVWLMSI

SEQ ID NO: 927 - protein, 1125 aa, unidentified
MIRRKERHMNWRLGLDLGTNSIGWSVLSLNGRNEAEKLEDMGVRIFSDGREPKTGKPLAAARRTARGIRRNLLRRKIRRRTLFRLLQKDGLFPSLRGEAAELKQLDPYALRAKALDERLEPHELGRALFHLGVRRGFKSNRKDAQNEQDDKKKEKSEQNEKIQCFKHELKNGQMRTLGEYLFETKEFRFSSNANLKNFYPDRQMYEDEFAAIKAKQEPFYPALGWDAIHEAIFKQGKLEPQKRGKCQFMDEERTFKATPCSQQFRILQEVFNLTYTDVITNKATELSPAQQDALIAALDNKKEMSFSSIRTLLKINGTFNLETLNRDKLNGNATACEMRKDTHFGKLWDDKMKLAEQDALIETLITTDEDSEAERFLKKYPLTSEQRKAILRFPFPSGTASFCREATEALVATMRETRLQYDKAALVLGYEHSDQSVEQYDLLPYYGKALSGSTMGVKATPGTNPDELQYGKIANPTVHVALNQTRAVVNALIKKYGKPAQIVVETSRDLKASKEKREEITEQQKQRARQNDIDNQSITDGFRISFPNRSDRLKYRLWVELNASNAFERQCLYCGKQINAAELFSDNIEIDHILPFSKTLLDVESNKTVAHWKCNQIKGGRTPYEAFHANPAGYKWEAIRGRIAQLKNPAKRRRFSADALTEFEDKEAFIARQLKDTQYIARINLQYLKTLVDDTNIWATTGRMTGLLRERWDLDSILKRDTDGIKQKIDELSDNGKKIAEAEKAKLLREAKKNRRDHRHHALDAVVIGLVDHALVKKIMTENARGNLDKVKVPLFPLWAEIIEKMRNIVVSFKPDHGAQGKLSKETALGRIRQEALLPIEKLTKDDVPHIKDTRVRGAFEQRLAETKDFKAAVKEMQTDYPRIRVFRPCFVNRIPLANLKNKQNIAGIVDMGIQNKLREFVDAHPNEKFDKALVKFSEQTGIKRIRYKNHDQNPWEIKTRKNKSLPEEQRRYYGTEDYFAAIIWEIPPTKTGAKPEYKAQYVRRTEIDTDSNLKPEALANKPHPAATKICQLHKNDYIEFAENGVWKKARIAGLKGSDGRLDIRPIYATDDARSWIIATAEQMLEKSWKPVEGQNFVSVNVLFGKYAAHKIRVSPIGAVSRKAT

SEQ ID NO: 928 - protein, 1021 aa, Demequina sediminicola
MTGTDATAHSHTPYRLGLDVGTGSLGWAVVELDTDGNPVRIVRTGSRIYGSGRKPKDFSSLAADRRAARQMRKQRDRYLQRRTRLMHELVAAGLMPEAEVERQKLKDLNPYLLRARGVKEELTAHELGRALFHLQQRRGFKSNRKTDRKDDDRSAMKSAIASLQSDLGDDTLGTYMWKRIQNGESVRSRPRKVGSKNEYDFYVNRAMVEDEFNQLWDYQSQSHGDLLTDEARIRVHDAIFSQRPLKPVDPGRCTFETDQRRAPKALPSSQLFRIYQELNAIRVIDPFSSDQADRPLTRQERDAGASFLLGRVKATFPQLKKAMFGPTKLQLSLEYGERKNILGDVVGSELRKAQHIGPDWETYDLATQDLIVTILLEADTDDEVIERLQAESSLSLDQVHGALEAPLPDDYLRLSHRAIGKILPHLKDEWNEEGNAPVMYDAAVRAAGYQSHSEFHSGVLEDTLPYYGKVLKRYTQEVSGSSQAATNPDEWEFGKIANPTVHIGLNQIRTVVNSLIDRYGLPTQIHVEVARDLGQSAEGRREAASNRAKNERANEALNARLTELGQRTNFANRERLRLYDEISVLNHRCVLTGIPIEMSRLFTNDYQVDHILPFSRTLDDSRGNKILVHHTANQFKGARSPFEAYSETADWDHILQRASDAFGATSPKFKRFSADAMDRYSNGEQDFIARQLNDTSYLARVTREYLGSIVDPDRILATPGRLTSLLRHHWGLNGLLSDAAEKNRSDHRHHAIDALVVALSERVTLKAVTDANRRAGDQGIERLLVDLPQPWEGFADHARESVDRIVVSHKPDHNEKGQLHEETAYGVLEGPDKKGRFLTRKRITDPAKGVVGSWEQPKWRDVIPLYRRGEGPDSTLPYKAYIGGSNYCIEIVRTAKGKWAGEVVSTHTANTAEYRAFMAEPGAYRAQSYAGGDLVMRLIANDTIAIEVGDAGRQIMRLCQLETVGAMYFANVREGNVAARSRARDNDFSLLKKAASTLQPLKARRVFVDPIGRVFDPDFKE

SEQ ID NO: 929 - protein, 1376 aa, Candidatus Symbiothrix dinenymphae
MEKILGIDLGTNSMGLTLRDDNEFSWYGVYTFKKGVGEGKSGEFSYAAECTKHRSSRRLYNARRYRKWETLKVLIDNDFCPLSEENLNKWKHYEKGLGRFFPVNDIAFQQWIKLDFNNDGVPDFTSPYQLRKLLIIEKLDLSISENRYKVGRALYHVAQRRGFKSSRKSGANEKTAVYKGSNETKTIGRNEYENLIIEHETLGAAFAYLENERIRVRNRYTLRSDYQQEVQKIITFQKIENREFAEQIEKAIFFQRPLRSQKGLVGKCTLETNKPRCPISHPKFEEYRAWSFINNIKYRIDNHSDFEPLPLDLKEKIYHEIFFFKSKREFLFSEIRKFIQTNGGRNWELNYSPKMDGISVPSCCVSARLKSVFGNDWHFFEKIVVKTNKKGENETITYTIDDIWHILFSFADEENFIEFCAKTLELDDNQIKELTTLFNSFPVGYANLSLKAIKNILPFLREGLIYTESVILAKIPEIISEQLFKEHKNIILAEIKNEIAKNRYEKMIITVVNNLIFKYYALDYNERFAWKDFSYKLNESDFKDIEKAVIEHFGEKSWNKKSDNEQQKFLSDVTEKYQTFFADEKREHIKPPHLVNQIKEFLLAKFDVAEKKLNKIYHPSQIDIYPKKEDQQLLKSPKTAAFKNPMAYKTLYKLRDVINYLVETERIDKDTRIVVEIARELNDANKRWAIEAYQRRRETENLVFKAAITELIKDTNFKGFADPESSEDIDKFRLWTEQTDNYEETSKAIAEIDKNKNISDKDIQKYRLWKEQNCTCIYTGKIINLTDLFDQNKVDFEHTIPRSKSFDNSLANLTVCYADFNRNIKKNKMPTELDNYDEIKNRLEAWEKKVDDLEKQIDFWKTKSKHAQDKDEKDNTIRQRHLRQMEYDYWKNKLDRFTRTEVSQGFINSQLTDTQIITKYAFHYLKTVFDKVDVLKGTNTAQFRKIYGIQPKFEKKDRSEHSQHAVDATVLTLIPSAKKREEILKKSYEFEEKPENKNRQYHEKPFSSFNHSMIEEIQKNILINNLADKDQTLTPGEKIVRKRGRVVWLDKENRIPKIAQGDSIRGELHLQTYYGKIKIAAKDEQGTLQRDEDGNILYNQIDGKDEMWMVLRKSIESVNFNTDVIVDVHLAEHLKAQLSKGIKQTELEDFQGNKLRHLRCRVKAARGFMNSENATIVKEHVYKSEKDYKNFIYAASGENFLFALYENEQGKSIVPFNVFEAAKYSKYLDNINYVDLYKSKEPIYIGRGANKKVATLKHIFQVGQKVLFFNEQKEELFDLEQEDISKRLYYVKTLFDANTQRIIFQHHLEARSNEQLLIDFPKEQFGTKGKDGFSKFTADFIAPRLLLTPSNFNFIIEGKDFEMKLDGTIEFKEADV

SEQ ID NO: 930 - protein, 1315 aa, Fructobacillus ficulneus
MGYSVGLDIGTGSVGWVVTNEDGKLARAKGKNLIGVRLFKTAEPAADRRTNRTTRRRLSRRKWRLRLLDELFANELGKIDSNFLTRLKYSYVHPKDDANRANYYGGYLFPTQEETKKFHAKYPTIYHLRLALMTESRQFDLREIYLAMHQIVKYRGHFLNSQSKMTIGNTYNPQDLQTAMENYAEAKGLSIELKQPEEMVAILTGEAGFGLSKKAKAEKLLNNFFFDTKEEKATVQAILAGIVGNTIDFTKVFNRQLTGDTLKAWKLKLDSETFDVDSEPILSDLDDDETELFFAIRQAFDGFTLMNLLGDQTSISAAMVERYTQHHDDLLTVKQVAKKQGLSHKEFSNIYSAFLKDDTDKGMKKLLEESNLSTEDVNGIQLRMDSHDFLPQQRTKANSVIPHQLHLAELEAIIENQGQYYPFLLETFEKEGTAANKIAELLKFRIPYYVGPMVTKKDVENAGGDATNHWVTRNEGYEKSAVTAWNFDQVFNRDQAALDFIQRLTGTDTYLIGEPTLPQNSLKYQMFTVLNELNNVKVNGRRIDNQTKHDLIQDLFKSKKTVSLKAFQDYYQSQGKSDIQVVGLADKTKFNSNLSTYIDLSKTFSAEEMENPQNQDLLEQIVEIQTVFEDSKIAERELSKLELTPEQVTKLAKTHYTGWGNLSNKLLTTPIVDVSGKKVSILDQLAKTSKNFMSIISNEQYGVQDWIKEQNTTETTGTLEDKLADLTTSPANKRGIKQAFNVLFDIQKAMKSEPDRVYLEFARETQTSVRTMSRYNYLKGLYQSKSLDAEAKNLKKELAETDQKKFDNDRLYLYFQQQGKDMYTGQPINIDKLSSDYDIDHIIPQAFTKDDSIDNRVLVSRPENARKSDSGTYTTEVQAAASGLWKTLVQSGFISRKKYDRLTHAGDYSEGQKTGFIARQLVETRQIIKNVAALIESEFDQTQAVAIRAEITGDMRRLVAIKKHREINSFHHAFDALLITAAGQYMQKRYPDRDSNNVYNEFDRYTNDYLKKLRESSSKDEVRKLKPFGFIVGTMAKGNEDWTTEQTEYLRHIMNFKNILTTYKTGPDRGPLSKETIYAVDPKAKLIGTNKHRQDVSLYGGYTYPYSAYMTLVRANGKNQLVKVSRSAASLMKSGQLKLEDYVQQQPEVKKFEKILLEHLPLGQLVDNDGKLMYLTSYEFYHNAKQLWLSTENADLISSLSIDSDDQKLIKAFDILTADSVIERFPFYEIDLKKLIELRDKFVLIDNKLDVLRVVLKALQLDSAQQKPLKLIDKAATDWKNYRQAGGIKLSDNAEIIYQSTTGIFEKRIKISDLL

SEQ ID NO: 931 - protein, 1323 aa, Fructobacillus fructosus
MVYDVGLDIGTGSVGWVALDENGKLARAKGKNLVGVRLFDTAQTAADRRGFRTTRRRLSRRKWRLRLLDELFSAEINEIDSSFFQRLKYSYVHPKDEENKAHYYGGYLFPTEEETKKFHRSYPTIYHLRQELMAQPNKRFDIREIYLAIHHLVKYRGHFLSSQEKITIGSTYNPEDLANAIEVYADEKGLSWELNNPEQLTEIISGEAGYGLNKSMKADEALKLFEFDNNQDKVAIKTLLAGLTGNQIDFAKLFGKDISDKDEAKLWKLKLDDEALEEKSQTILSQLTDEEIELFHAVVQAYDGFVLIGLLNGADSVSAAMVQLYDQHREDRKLLKSLAQKAGLKHKRFSEIYEQLALATDEATIKNGISTARELVEESNLSKEVKEDTLRRLDENEFLPKQRTKANSVIPHQLHLAELQKILQNQGQYYPFLLDTFEKEDGQDNKIEELLRFRIPYYVGPLVTKKDVEHAGGDADNHWVERNEGFEKSRVTPWNFDKVFNRDKAARDFIERLTGNDTYLIGEKTLPQNSLRYQLFTVLNELNNVRVNGKKFDSKTKADLINDLFKARKTVSLSALKDYLKAQGKGDVTITGLADESKFNSSLSSYNDLKKTFDAEYLENEDNQETLEKIIEIQTVFEDSKIASRELSKLPLDDDQVKKLSQTHYTGWGRLSEKLLDSKIIDERGQKVSILDKLKSTSQNFMSIINNDKYGVQAWITEQNTGSSKLTFDEKVNELTTSPANKRGIKQSFAVLNDIKKAMKEEPRRVYLEFAREDQTSVRSVPRYNQLKEKYQSKSLSEEAKVLKKTLDGNKNKMSDDRYFLYFQQQGKDMYTGRPINFERLSQDYDIDHIIPQAFTKDDSLDNRVLVSRPENARKSDSFAYTDEVQKQDGSLWTSLLKSGFINRKKYERLTKAGKYLDGQKTGFIARQLVETRQIIKNVASLIEGEYENSKAVAIRSEITADMRLLVGIKKHREINSFHHAFDALLITAAGQYMQNRYPDRDSTNVYNEFDRYTNDYLKNLRQLSSRDEVRRLKSFGFVVGTMRKGNEDWSEENTSYLRKVMMFKNILTTKKTEKDRGPLNKETIFSPKSGKKLIPLNSKRSDTALYGGYSNVYSAYMTLVRANGKNLLIKIPISIANQIEVGNLKINDYIVNNPAIKKFEKILISKLPLGQLVNEDGNLIYLASNEYRHNAKQLWLSTTDADKIASISENSSDEELLEAYDILTSENVKNRFPFFKKDIDKLSQVRDEFLDSDKRIAVIQTILRGLQIDAAYQAPVKIISKKVSDWHKLQQSGGIKLSDNSEMIYQSATGIFETRVKISDLL

SEQ ID NO: 932 - protein, 1104 aa, Jeotgalibaca dankookensis
MGYRIGLDVGIASVGYSILKTDSYGNPYRIEFLNSVIFERAEQPKTGASLAAPRREKRGMRRLNRRKQFRKHRTKRLFIESGMLSEDEITHIFENTGDRSIYQLRTEALDHLLTNQELFRILYFFAGHRGFKSNRKSELTEKDNGPVISAIKDIQKDLTDKDYRTLGEYLYKDDKYAEHKRNKEHTYIGTAERNMLVEEINLLLTKQQEFGNEAITPEFIERFIGNGEKPGIFNQQRDFDEGPGAQSPYAGDQIEKMVGYCAFEPTEKRAAKASYTFQYFDLLSRVNNLKVQEMVGAEYKHLNHEERRLIIDKAFEKEKITYADIKKMLNLGEHARFNLLNYGSVKDAKKTEKTNFIHLKSYHTLKKTVGKEEFSHFTKSQIDEIADILTKYSSDRKRIEKFKERTTLTDEQIDKLLPITFSKFGNLSVKAMQNIIPYLELGDIYSEAATNAGYDFRHNKIDWEYIEENVMNPVVKRAVSKTIKVVDQIIRKYGEPDAISIELARELGRSFDDRKKITKHQEENRARNEKVAKRLEELGFPVNGENITRLKLWEEQGNFDPYTGIEIPLEQVFTYMYDIDHIIPYSKSFDDSYTNKVLTSAKCNREKGNRLPLEYFGNDPLRVAALESVMKSIHNKRKRDFLLKKKLSKEDISEWKQRNLQDTQYISKLLRGYFDQNITFSKELDKKQRVFVANGMITSRLRARWGLNKVRDDGDKHHAMDATIVACITPTLTRMLTLYSRRQEVKENPNLWKAYEESEDPELAKMTSIKREQYEKIFSKYFPQPWPGFSQELIMRLSDNPKELIKAQGFEEARKLYTPEEIEELKPIFVVRMPKRKISGAAHLDTIRSAKLLDEGKTISRVPVNKLKLDKNDEIVSGNAHFYRSTDKGWTIVYEALYKELVKHNGDGAKAFPEGELRYSHNGNEHVVRKVKMVQKSTLQATLNDGKSVADNGSMVRIDVFKTPKKYVFVPIYVKDTVEEELPNKYVVPLKPYSEWIKVVEDEFLFSLYPRDLVHIKSKSGIKPIFTNGRKAEKNEIIHDFLGYFVGADIHTGSIQVISNDNAFKTRGIGFATLPKIDKYTVDYFGNYQKVTEKKRQTFNRKKG

SEQ ID NO: 933 - protein, 1369 aa, Lactobacillus gorillae
MKEYHVGLDIGTSSIGWAVTDSQFKLMRIKGKTAIGVRLFEEGKTAADRRGFRTTRRRLKRRKWRLHYLNEVFAPHLQEVDENFLRRLKQSNIHPDDPAKNQAFIGKLLFPDLLKKAERGYPTLIKIRDEAPEEERAHYPVTNIYKLREAMINEDRQFDLREVYLAVHHIVKYRGHFLNNASVDKFKVGKIDFAKSFNVLNEAYKELQNGEGSFAIDLDQIDEIGKLLLDTSKKKLDRQKEVAKLLAVKVADKDETKSNKKVATAISKLILGYKANFATDALVDDKANDWKIDLSSETSDDDIEKFSGELNDAQNDILTEITSLFSQLMLNEIVPNGMSISESMMDRYWTHQRQLAEVKKFLATQPSEVRKSFNSLYNQYIGQEPKTKGYDFEKGLKKLLKEMPNWKEIEGQLKAGEFLPKQRTSANGVIPHQMHQQELDRIIEKQAKYYPWLAKKNPATDDRDRHKAKYELDQLVSFRIPYYVGPLVTLKDQERTSGAKFAWAKRRAAGEITPWNLWGKIDRAESAEAFIKRMTVKDTYLLNEDVLPANSLLYQKYNVLNELNNVRVNNHRLSVGMKQDIFNELFESKKTVKASDVASLVMAKTRGVNKPMIEGLSDPKKFNSSLATYLDLKAIIGDKVNDNRYRDDLERIIEWRSVFEDGEIFADKLTEVAWLTDAQRSALGKKRYKGWGRLSKKLLTGLVDENGQRIIDLLWNTDQNFMQIVNQPVFKEQIDQLNQSAIAKEGTTLGDQVESILDDAYTSPQNKKAIWQVVRVVNDITKAVGNAPKSISIEFARNEGNKGERTRSRRNQLRSLFQNQARELVKDTSLLEELENTPDLSDRYYFYFTQGGKDVYTGEPINFDDIPTKRYEIDHILPQSFLKDNSLDNRVLVSQAENSKKSDRVPAKLYATKMRPYWEYLLKQGLITKQKFENLTLDIDQIVKYRSLGFVKRQLVETRQVIKLTADILGSMYRDAGTDIIETRASLTKQLREEFDLPKVREVNDYHHAVDAYLTTFAGQFLTRRYPKLRSFFVYGEYMKFTKGTDLNLRNFDFFHELVKDKHEKNNEDKKVYDDRGMLIISRSSLANYLNQIIRMKIMRVTKEIRIENGMLYKATINSTKNLGNVNIPLKKEMPVDLYGSYLSKETSFMSLIRIKGQRTARIVRVPVDALSKLSKYEKHSKEYLDELYKTIKNNNNIINDFIIILPQLGFNQLILDKVGGERVSYRLGGYDTKHLATELVLKKETLKKINNNFSEIKKSDNPSQEFDELFDEIIKTSAKYLPLLRKKILKIESNRRKFYEADVVKKERELNNILAAIHANNGTRHDLKTLNVSEFGRIRCAITLTKDAEVVFESPTGLFIRRLKISNI

SEQ ID NO: 934 - protein, 1345 aa, Streptococcus orisasini
MTKPYSIGLDIGTNSVGWAVITDDYKVPAKKMKVLGNTDKNYIKKNLLGVLLFDSGNTAEDRRLKRTARRRYTRRRNRLLYLQDIFSEEMSKVDESFFRRLEDSFYVPEDKRDAKHPIFGTLDEEKAYHKQFPTIYHLRKHLADSSEKADLRLVYLALAHIIKYRGHFLIEGEFDTQNNDVQGLFDEFLVVYDNTFENSSLHVQDVQAEEILTDKISKSAKKDRVLKLFPNEKSNGRFAEFLKLIVGNQADFKKHFELEEKAPLQFSKDSYEEDLEGLLTQIGDDYAELFLSAKKLYDSILLSGILTATDVSTKAPLSASMIKRYKEHQTDLAEFKKFIRQNLPDKYNEVFSDTSKNGYAGYIDGKTSQEDFYKYLKKLLAKVAGSADFLDKVEREDFLRKQRTFDNGSIPHQIHLQEMHAIIRKQAKFYPFLAENQDKIEKILTFRIPYYVGPLARGNGDFAWLSRKSNEKITPWNFDDIVDKESSAEAFINRMTNHDLYLPDQKVLPKHSLLYEKFTVYNELTKVKYKTEQGKTSFFDANMKQEIFDGVFKVYQKVTKDKLMNFLEKEFDEFRIVDLTGLDKENKAFNASYGTYHDLRKILGKDFLDNPNNEKILEDIVLTLTLFEDREMIRKRLENYSDLLTKEQVKKLERRHYTGWGRLSAKLIHGIRNKENRKTILDYLIDDGNSNRNFMQLINDDALSFKEEIAKAQVIGDGDNLNQAVSDIAGSPAIKKGILQSIKIVDELVKVMGHNPENIVVEMARENQFTNYGRRNSQQRLKGLTDSIKELGSQILKEHPVDNSQLQNDRLFLYYLQNGRDMYTGEELDLDYLSQYDIDHIIPQSFIKDDSLDNKVLVSSAKNRGKSDNVPSEEVVKKMKSFWNKLLKAKLITQRKFDNLTKAERGGLTDDDKAGFIKRQLVETRQITKHVARILDERFNTKLDENNKKIRQVKIVTLKSNLVSNFRKEFELYKVREINDYHHAHDAYLNAIVGKALLGVYPQLEPEFVYGEYPHFHGHKENKATAKKFFYSNIMNFFKKDDVRTDENGEIIWKKDEHISNIKKVLSYPQVNIVKKVEEQTGGFSKESILQKGNSDKLIPRKTKKFYWDTKKYGGFDSPIVAYSVLVIADIEKGKSKKLKTVKNLVGITIMEKVTFEKNPVAFLERKGYRNIQEENIIKLPKYSLFELENGRRRLLASARELQKGNEIVLPYHLGVLLYHAKNIHKIDELEHLNHVEKHRDEFKELLDIVSNFSKKYTLAEGNLGKVEELYAQNSSKDINELASSFINLLTFTAIGAPAAFKFFDSNIDRKRYTSTAEILKATLIHQSITGLYETRINLSKLGGD

SEQ ID NO: 935 - protein, 1153 aa, Lactobacillus farciminis
MTDRISLGLDIGVASVGFSVLDIDKGKVIELGARLFNATVAAGNQDRRDMRGSRRLLNRNKQRRKDVSKLFQEYGLLDNFDRDNFHTAFNNNWNPYELRVKGLTKQLNKEELADSLYQIIKRRGISYALKDADANEDGTDYSSSLKINSQELIEKTPAQIQLQRLNDYGKVRGKVIVGDDIDDQKVLLNVFPTNAYEKEARQIIATQQQFYPEILTGEFVKEYCQILTRKRDYFVGPGNEKSRTDYGIYKTDGRTLDNLFEELIGHDKIYPDELRASAASYTAQLFNVLNDLNNLRILSYEDGKLTQIDKEKIIAEIKNNTTVVNMLNVIKKVTGCQKDDIKGFRLNEKDKPEISSMPIYRKAHKDFLKVGIDITDWPIDFIDRLSFILTLNTENGEIRKQINKRLVPDFDFLNDDLVQLIIDNKDSFDIKTNNKWHRFSLKTMNKLIPTMIERPVEQMTLLTEMGLIKKDTKRFEGNKYLPYKEIANDIFNPVASKSVREALKIVNAVLKKYGHIEYIVIEMPRDKNLDEERKQIADFQKKNKKIKDAAFNAFVKAVGSKKNVKIALSKNRKLQMGIRLWHQQQGIDPYNGEEINANDLISNPDKFEIDHIIPQSISFDDGINNKTLCFASMNQVKGQKTPYEFLNEGHGQGYAKFKAIVSKNKNFSKAKRDNYLFEENVSNIETRKRFLSRNLVDTRYSSRVVLNSLQEFFHEKSDDTKVTVIRGKFTSNMRKHWHIDKTRDTFHHHAIDASIIAATPFLRMWKKGSTIFPTKINETSIDIETGEILDDKNFDKVMYEEPYSGFISEIMNADDRIKFSHQVDKKMNRKVSDATIYSTRIGKLSKDKKDAEYVVAKVKDIYSVDGYENFKKVYKKDKTKFLLYKYDPRTFSELEKIVIDYPDKIEKVQTNGKIKAVDISPFELYRRDNGMVRKYSKKTGPAIKQLKYLDKKLGSHIDITPKNANNKHVVLQSLKPWRTDVYLNHETGEYEIMGIKYSDLKFNKNEGYGIKKDKYLKIKNIEGVSENSEFMFSLYRKDRIKVQDMETNESVELLFWSRNFSNKKYAELKPISQIDNDKVLPIYGRGRLIKRLIPKNCKIWKVNTSILGDTYYLEKESNYPQKFLINHDGMVLFLLVRDALCVCAHIRLKFYCF

SEQ ID NO: 936 - protein, 1330 aa, Enterococcus pseudoavium
MAKEYTIGLDIGTNSVGWAVLDTNYDLIKKNMKIQGNGDKKKSKKNFWGVRLFEAGETAESTRMKRTTRRRYTRRRNRISYLQEIFQGEMDKVDENFFHRLEDSFLVPEEKRNECHPIFATLEEEVAYHEQFPTIYHLRKFLADSTELADIRLVYLALAHIIKFRGNFLIEGKLNTENSSVKETFKVFLQAYNQAFTVQENGSLINPVKETTDVSPVLQERVSRQRKAENALKLFPNEKSNGTFMQFLKLIVGNQGNFKKTFGLSEDAKLQFSKEEYEEELENLLGAVGDDYADVFAAAKNVYDAVELSGILTVKDIKTKAKLSASFIKRYEEHKTDLEKLKKFVRKELPEKYYEVFRDSTKNGYAGYIENSSKVSQAEFYKYLEKLLKNIPGSEYFFDKINQEDFLRKQRTFDNGVIPHQIHLEELRAILGKQGHYYPFLKENQEKIEQILTFRIPYYVGPLAQGNSRFSWLSKKTDAAIRPWTFTEVVDEGKSATAFIERMTNYDSYLPQEKVLPKHSLLYEKYMVFNELTKVSYLNDRGEIHNFSSVEKKEIFSELFKKNRKVTYALLEHFLKNQYMIETAEIRGIEQRFNASYGTYHDLIKLGISQEMLDDPVNEPMFEEIVKILTVFEDQKMIKEQLSKYADYFEPNVLKKIVRRHYTGWGRLSAELIDGIRDQQSKKTILDYLMRDDDLPVNKNRNLMQLINDENLSFKEIIQQRQSVDQTADLHEVVKELAGSPAIKKGILQSLKLVDEIVKIMGYPPTNIVVEMARENQTTSRGRDKSKARQKVLEEAMKEFGSNILKEYPLDNANLRNDRLFLYYLQNGKDMYTGKELDISKLSQYDIDHIIPQSFIKDNSIDNLVLTSSTENRGKSNDVPDEKIVSNMTNFWEKLKKANLISQRKFDNLTKGSLTDADKAHFIQRQLVETRQITKHVARILHQKYNAEAEDTTRIITLKAALTSQFRQIYQLYKVREINDYHHAQDAYLNGVVAQALLKVYPRLEPEFVYGDYQKFNLFKENKATAKKNFYSNLMHFFESTQPKVDENGEILWDQKNIAMVKKVMTYRQMNIVKKTEIQTGGFSKESILPKGDSAKLIARKKEWNPQKYGGFDSPNIAYSVVINHEKGKQRKLTKDIVGITIMERRRFEENEHQFLADKGYQNPRVLAKLPKYTLYELENGRRRLIASATEAQKGNQMVLPNQLVELLYHAKHCEDLDGKSLNYLNTHRDLFNELFEYVSQFADRYTLADKNLKTLASLYEQNQEADSKILAQACLNLLQFNKMGAPADFKFFDTTIPRKRYTSIKEILTATIIHQSITGLYETHWKLGE

SEQ ID NO: 937 - protein, 1133 aa, Enterococcus canis
MKQNKELVNIGFDIGIASVGWSVVSKQSGKILETGVSIFPSGTASKNEERRSFRQARRLLRRRKNRISDLKILLEENGFRIAKLNQLVTPYELRVRGLNEQLSKEELSVALLHLVKRRGISYSLEDSEGEGDNQTSYKQSVSINQKLLKEKTPGEIQLERLEKYGKIRGQVKDLQEENAAVLMNVFPNTAYVREAELILLKQKEYYSEITDNFIKEATALISRKREYFVGPGSEKSRTDYGIYRTDGTKLDNLFEILIGKDKIFPNEFRAAGNSYTAQLYNLLNDLNNLKIKTLEDGKLTKDQKLSIIEELKTTTKKVNMMQLIKKIAKAEESDISGYRIDRNDKPEIHSMAIFYKVRKKFLEQEIDINDWPIDFLDILGRVLTLNTENGEIRRSLTELKKDYIFLDETLIELIINSKDSFKLTSNQKWHRFSLKTMQLLIPELLNSSKEQMTILTELGLLHENKQDYSNKTKIDVKNLTENIYNPVVRKSVKQAMDIFNSLFKKYPNIAYLVVEMPRDEAEDEVEQKKQAQKFQKENEAEKEKSLKEFQELAGVSDSQLENQIYKRRKLRMKIRLWYQQLGKCPYSGKTIAAEDLFWTDHLFEIDHVIPLSISYDDGQNNKVLCYSEMNQEKGQKTPYGFMQSGKGQGFSALQAMLKSNSRMSGAKKRNLLFTEDINDIEVRKRFIARNLVDTRYASRIVLNELQQFTRSKQLDTKVTVIRGKFTSKLRETWRLNKSRETHHHHAVDATIIAVSPMLKLWERNAEIIPMKVNENVVDIKTGEILTDKVYQEEMYQLPYASLLEDIAVMENKIKFHHQVDKKMNRKVSDATIYATRSAKVGKDKEPQNYVLGKIKDIYDTKEYENFKKIYDKDKSKFLMQQLDPMTFEKLEKVLKEYPDFEEVQQDNGRVKRIPISPFELYRREKGPITKFAKRNNGPAIKSVKYYDSKMGSAIDITPQTAKNKKVVLQSLKPWRTDVYFNQETKEYEIMGIKYSDMQYLNGNYGITNERYKEIQREEGVADNSEFMMSLYRGDRIKVIDTNSDESVELLFGSRTIPTKKGYVELKPIEKTKFDSKEIVSFYGQVTPNGQFVKKFTRNGYRLLKVNTNILGNPYYISKEGINPRNILDTGFKG

SEQ ID NO: 938 - protein, 1141 aa, Globicatella sanguinis
MEENKIYSIGLDIGIASVGWAVLNTKVQNIDDLGVRLFSARNSDNNLERRTSRGMRRLNSRRKTRKNDAKRFLVEHGFYEDEKLMNECPYRLRVKGLDEKLSKAEIYKVILHILKKRGVSYLDDSVVEDAPSGQDYKGAVESNLKLTQELTPGQIQFNRLNEDGRIRTGVNFKGEYQLNVFPVKAYANELKRILECQKDYHEEINHEFIDFFIRKEGKPEEIGLVYRKRPYYHGPGNKHNNSEYGRWANYEEDGKPAENIFDKLIGRDLQGYLRAASVSITAQKYNLLNDLNNITIDRENPKITTEEKEQILDFIINRDSSRLSYKDIFKEIGLSMDKIRGYRIDRNGKPEFHTMGAFRRWKTVFAEYDIDINTIDDKTYNEIAKAVMLNTERDGILDTLNNSLPDMDKNILEIVLDNKDKLRRKDGNESWHSFSIKTMEILIPELINTSEEQNTILERLGIKKINRRQLQKEKTIPADVILDEIYNPTASKSVRQAIKVFNALVKKYGKENIANVVIEMPRDKNEKEEQDNIKLMNKNNEQRKKDSQAYFLEKSGWNIERFESELRRPAFAKKLYHYFEQDGKCAYSGKAIQPEMLLTNETEIDHIIPLSISLDDSLKNKVLVKAEANQEKGQRSPIQAFDEGANFGQSKEAFIAWVSQNKNFAGKGKVTKAKLLLEDRNIYDPEVRDEFIARNLNDTRYSSRIVLNAIQSFFYESRTKVKVINGNFTHTLRKKWGDNLEKTRETHYHHAVDAVLCAVSPYVKPTAYEYRETEEGRAEMVDLDTGEVMSYAEYKKLRNIDKKSYIPEWKNFREQLYPSSLYPRIKFSHQVDKKSNRKVSDATIYSTREKTSVTKNGKEKTEEYVIAKIKDIYTVDGYKEFEKNRDKLLMKELDSKTFEILCKIADTYPNYIEKQDASSKVKKVDISPFKLYCAENNILAIQKYSKRGNGPFIRSLKYYNKKIGNHINITKDNDGQKIEQTERGKKVILANLNPWRTDVYFDPKTQSYNLLGIKYNHLKYQKGEYGIPKEIYQELMEKEKIGKEQEFVFSLYRKDLIRIEQGDLFVEGLYHSRNEVSKNYFEIKPVEQNKWTKEELPVLGITSNQRVIKGIKPEMILKKYYVDVLGNKFEVKKEEGPQNIL

SEQ ID NO: 939 - protein, 1092 aa, Brevibacillus laterosporus
MAYTMGIDVGIASCGWAIVDLERQRIIDIGVRTFEKAENPKNGEALAVPRREARSSRRRLRRKKHRIERLKYMFVRNGLAVDIQHLEQTLRSQNEIDVWQLRVDGLDRMLTQKEWLRVLIHLAQRRGFQSNRKTDGSSEDGQVLVNVTENDRLMEEKDYRTVAEMMVKDEKFSDHKRNKNGNYHGVVSRASLLVEIHTLFESQRQHHNFLASKDFELEYINIWSSQRPVATKDQIEKMIGTCTFLPKEKRAPKASWHFQYFMLLQTINHIRITNAQGTRPLNKEEIEQVVNMALTKSKVSYHDIRKVLDLSEEYQFVGLDYGKEDEKKKVESKETIIKLDDYHKLNKIFNEVELAKGETWEAVDYDTVAYALTFFKDDEDIRDYLQNKYKDSKNRLVKNVANKEYTNELIEKVSTLSFRKVGHLSLKALRKIIPFLEQGMTYDKACQAAGFNFQGISKKKRSVVLPVIDQISNPVVNRALTQTRKVINALIKKYGSPETIHIETARELSKRFDERKNITKDYKENRDKNERAKKHLSELGIINPTGLDIVKYKLWCEQQGRCMYSNQPISFERLRESGYTEVDHIIPYSRSMNDSYNNRVLVMTRENREKSNQTPYEYMGNDTQRWDEFEQRVTTNPQIKKEKRQNLLLKGFTNRRELEMLERNLNDTRHITKYLSHFISTNLEFSPSDKKKKVVNTSGRITSHLRSRWGLEKNREQNDLHHAMDAVVIAVTSDSFIQQVTNYYKRKERRELNGDDKFPLPWKFFREEVIARLSPNPKEQIEALPNHFYSEDELADLQPIFVSRMPKRSITGEAHQAQFRRVVGKTKEGKNITAKKTALVDISYDKNGDFNMYGRETDPATYEAIKERYLEFGGNAKKAFSTDLHKPKKDGTKGPLIKSVRIMENKTLVHPVNKGKGVVYNSSIVRTDVFQRKEKYYLLPVYVTDVTKGKLPNKVIAAKKGYDDWIEVDDSFTFLYSLYPNDLIFIRQNPKKKISLKKRIESHSISDSKEVQEILTYYKGVDSSTAAIEFITHDGSYYAKGVGVQNLDCFEKYQVDILGNYSKVKGEKRLELETSDNNHKGKDVNSIKSTSR

SEQ ID NO: 940 - protein, 1086 aa, Pseudaminobacter salicylatoxidans
MPFRQPVSYAFDMGTNSIGWCVFRLNAAGHPVAIADAGVRIYSDGRDPQSKTSLAVARREAKAAARRRDRTKRRQKATLRTLAEYGLMPGGKDERERLLRETADSADRNAPANDPLNLRARALTEKLPLHHIGRALFHLGQRRGFKSNRKTDRRENDKGKIAIGIDRLRDAIREAKAETLGVFLASRRAQGLHVRLRAGSSVILDDGYDFYPVRSLLEEEFRHIWDAQAVHYPDVLTEARGEHLFKVIFYQRPLKKPRIGSCTFNPLEQRLAKAHPLFQAFRLYKEVNELEIVAPYLSQRKLTLDERDALMRRLRGAKTAKYKTLRKDLKLTPDMRFNKESENRVDMAGDEVTAALSAKGLFGPRWNTLAMDSQWKVIERIQEEENPFVLHQWLVETHGLSDDAAEAVAACHLPEGYGRLGHTALSIMLEELKADVIPEAKAAERAGYNHSYFGTGEIFDELPKYQEVVARSIPPGTGDLGDEYDVRKGRITNPTVHIGLNQLQRLVNGLIRRFGKPAEIAVELARDLKTNEKKKTEINRRIGENTRAARQRSEKIAELRKDTPALVDNGYNRLLLKLWEELNPAKPEDRCCIYTGKPISISMLFSGAVDVDHILPYSRTLDDGQGNKLLCLREANRVKRNRAPSEVTEWANHYDEILERANRLPKPKRWRFARDAMADFDADSGFLDRQLTDTQYLSRLAREYLCSLYPEKHEQWRVRVIPGRMTEMLRRNWGLNKLLPDHIYGDAKNRNDHRHHAIDAAVVGVTTRSMLQRISTEAARREEQELEDVVKGIPVPWEHFRDDLQQALDNIVVSHKPDHGTVGLDDKGKWQTAGKLHNDTAYGLTGEADARGNTIVVRRKMLLSLTDKDIPAIRDDELRARLYSAVGGLSGKELQQALLDFARKDPKYRGIRRVRVTEPLTVIPIRDKDGNVYKGYKGDANYRYDVWEMKDGKWQAEVISMFDAHQKGWESPVRKANPTARKVLSLQQNDMVAYEHPSDGYTIARVVKFASSGQIVFARNNEGGSLKARDANRDDPFKYFSKTTNGLREIKARQIRIDETGRVYDPGPRDRESRMISNQKLKTIAI

SEQ ID NO: 941 - protein, 1353 aa, Streptococcus massiliensis
MKKPYSIGLDIGTNSVGWAVVMEDYKVPSKKMKVLGNTDKQSIKKNLIGALLFDSGETAVERRLNRTTSRRYDRRRNRIRYLQHIFAEEMNRADENFFHRLKESFFVEEDKTYSKYPIFGTLEEEKNYHKNYPTIYHLRKTLADTPDKMDIRLIYLALAHIIKYRGHFLIEGDLDIENIGIQDSFKSFIEEYNTQFGTKLDSTTKVEAIFTENSSKAKRVETILGLFPDETAAGNLDKFLKLMLGNQADFKKVFDLEEKITLQFSKDSYEEDLELLLSKIDEEYAALFDLAKKVYDAVLLSNILTVKEKNTKAPLSASMIKRYEEHKDDLKAFKRFFRERLPEKYETMFKDLTKPSYAAYVSGLYKKDAKRGLVPTSKRVTEDDFYKFSKGLLIDVEGAEYFLEKIEREDFLRKQRTFDNGAIPNQVHVKELQAIILNQSKYYPFLAENKEKIEKILTFRIPYYVGPLARGNSSFAWLQRKSDEAIRPWNFEQVVDMETSASRFIERMTLHDLYLPDEKVLPRHSLIYEKYTVFNELTKVRFTPEGGKEVYFSKTDKENIFDSLFKRYRKVTKRKLKDFIEKELGYGYIDIDNIKGVEEQFNASYTTYQDLLKIIGDKEFLDNEENKDLLEEIIYILTVFEDRKMIEKRLSELNIPFENKIIKKLARKKYTGWGNLSRKLIDGIRNRETNRTILGHLIDDGFSNRNLMQLINDDGLDFKEIIRKAQTIENIDTNQALVSSLPGSPAIKKGILQSLNIVDEIIAIMGYAPTNIVIEMARENQTTQKGRDNSAQRLKKIEDGIKLLGSDLLKQNPIQDNKDLQKEKLFLYYMQNGIDLYTGQPLNCDPDSLAFYDVDHIVPRSYIKNDSFDNKVLTTSKGNRKKLDDVPAKEVVEKMENTWRRLHAAGLISDIKLSYLMKGELTEEDKAGFIRRQLVETRQITKHVARLLDEKLNRKKNENGEKLRTTKIITLKSVFASRFRANFDLYKLRELNHYHHAHDAYLNAVVAQALLKVYPKFERELVYGSYVKESIFSRKISATERMRMYNNILKFISKDKKVDQETGEIVWDKKEIENIVKKVIYSSPVNIVKKREEQSGALFKQSNMAVGYNNKLIPRKKDWSVDKYGGFIEPAESYSLAIFYTDINGKKPKKKSTIIAISRMEKKDYEKEPERFLAQKGFERVEKTIKLPKYSLFEMEKGRRRLLASSGELQKGNQVLLPEHLIRLLSYAKKVDVLVKSKDDDYDLEEHRAEFAELLDCIKKFNDMYILASSNMSKIEEIYQKNIDAPIEEVARSFVALLNFTMMGAATDFKFFGQIIPRKRYPSTTECLKSTLIHQSVTGLYETRIDLSKLGEN

SEQ ID NO: 942 - protein, 1126 aa, Streptococcus massiliensis
MNGLVLGLDIGVASVGVGILDKKTGEIKHANSRIFPAATADSNVERRGFRQARRLSRRKKHRGKRLLDLFEEYQLLTDFSNLSLNLNPYQLRVKGMREKLTNEELFIVLKNIVKHRGISYLDDAAEDDNNSSSEYGKAVEENRKLLEDKTPGQIQLERFEKYGQIRGDFTIIDENGENHRLINVFSTSAYKKEAERILRKQQELNAAITDEFIESYIKVLTGKRKYYHGPGSEKSPTDYGLYRKINGKTEKIADNLFGILIGKCSFYPEEYRAPKASYTAQEYNLLNDLNNLTVPTETKKLSEEQKHQIVEYAKTEKTLGAKKLLQYIAKLTNGTFDDIKGYRIDKSDKPDIHTFEVYRKMQTIETIDVAILPRETMDELAHILTLNTEREGIEEAIKKEFLNQFSEQQILELVQFRKKNSSLFAKGWHSFSIKLMKELIPELYTTSEEQMTILTRLGKQKAKETSKRTKYIDEKELTGEIYNPVAAKAVRQAIKIINLATKKYGIFDHIVIEMARDKNEEDEKKEIQKRQKANEDEKSAAMKKAATLYNGKVELPDSIFHGHKELATKIRLWYQQEERCLYTGKKIDIQNLIHNQHMYEIDHILPLSLSFDDSLANKVLVLATANQEKGQRTPFQAIDTMDDAWSFREMKAYVNGLKNFSKKKKEYLLTEEDISKIEVKQRFIERNLVDTRYASRVVLNSLQDFYRQNDFDTKISVVRGQFTSQLRRKWKIDKTRDTYHHHAVDALIIAASSQLRLWKKQGNPLISYKDGQFVDPETGEILSLTNDEYKELVFQPPYEHFVETLKSKKFENSILFSYQVDSKYNRKISDATIYATRQAQLGKDKSEETYVLGKIKDIYSQSGYDDFIKRYHKDKTQFLMYHKDPVTFEKVIEKILEVYPDKELNEKNKEVPCNPFDKYRKENGPIRKYSKKGKGPEIKSLKYYDNKLGNHIDITPNNSQNRVVLQSLKPWRTDVYFNGQTGKYELLGLKYADLQFKQGGGYGLSLEKYKEIKCREGVAEHSEFKFTLHKNDLILIKDTESGEQQLFRFLSRTMPNQKHYVELKPYDKAKFEGDQKLMKIFGSVAKGGQCLKGLNKSNLSIYKVKTDVLGDKHFIKKEGEQAKLDF

SEQ ID NO: 943 - protein, 1224 aa, Alistipes ihumii
MTKILGLDLGTASIGWALVERNDTEYALLDQGVDIFQEGVAREKNSEKPAVQDRTAARALRRHYARRRLRKIDLLRVLVRHDLCPALTDEQLKDWKQKKIYPLTDEFIRWQRTDDRTDKNPYRDRYKALTETLDLDTQRDRYTLGRALYHLAQRRGFLSNRKDAGDESESGKVRQSIEGLTADMEKAGCSYLGEYFYRLYARKEKIRTKYTSRNEHYLAEFRAICEKQRLADDLRKALHRAIFYQRPLKSQKGSVGRCTFEKDKSRCPASHPRFEEFRMLSFVNNIRITTPDDPEPRPLSRQEAETILPLFTRKTKPHFDFEEIAKKLAGKGRYACQGDRGEAPYRFNFARTATVTGCPVTASLIALFGDDYLTKICDLYTLGAGKTREQILGDVWHALFSFDDEERLSAWAKQKLRLSDDEAGRFAAIRLPQDYAALSLHAINKILPYLREGYRYDEAVFVANLKAVLPPDIYSDESERNAIEADIAALITDFRQNPLNRGTTKEQCVRDYLRNCRGIDEKRLGRLYHPSMIEIYQTAQPDAQGILQLGSPRTPAVRNPMAMRALFRLRVLVNRLLRDGKIDRETKIHIEFARGLNDANRRKAIELYQRDREAERKAYADEIRRQYASESGREIEPTDDDILKYRLWKEQNHICPYTGKRIGLSDFMGDSARFDIEHTVPRARGGDNSQMNKTLCENRFNRELKRDKLPSELPNHADVMARIDELGWPKEIASLQKQIEIQRRKSKSATTKSEKDGAIQRRHVLQMRLDYWRGKYERFTMTEVPDGFSNRQGVDIGIIGKYARLYLKTVFERIYTVKGTTTAEFRRMWGLQEEYARKERVNHTHHCLDAIVIACIGRNEYDRWAQYAGDEERYRRGEGAKPRFEKPWPTFTEDLEAVADRLLVAHHTPDNMPKQSRKRLRIRGRIRTGRNGETLYAQGDTARGALHQQTFYGAIERQGEVRYVVRKPLGQLQPSDVDNIVDDAVRQKVKEAIDAVGFKTAMDTESHPIWMNEQKRVPIRKVRIFVGKNISPKPLGGKKHRDLSALPHKRPVYVSYGSNYCMAIYEGKDNQGKLKRTFEIVSTLEAAQYFKASADKAARPDLVPQSDEKGFPLKCILKTGTMVLFYEETPEELYDCTQQELAKRLYKLTKFSSMTTGNNSYGLCTFRHHREARPAGELKPKGGAWKAGEAYRPLISLYHTQLNAYVEGFDFELSVTGTVRFKHE

SEQ ID NO: 944 - protein, 1192 aa, unidentified
  source 1..1192: note = Streptococcus
MNGLVLGLDIGIASVGVGILEKNSGKIIHTNSRIFPAATADSNVVRRSSRQARRLNRRKKHRRVRFQDLFEDYGLLTDFSKVSINLNPYRLRVDGLNQQLTNEELFIALKNIVKRRGISYLDDASEDGGTVSSDYGKAVEENRKLLAEQTPGQIQLDRFERYGQIRGDFTVLENGEKCRLINVFSTSAYKKEAERILRKQQEFNSKITDEFIEDYLKILTGKRKYYHGPGNEKSRTDYGRFRKDGTTLDNIFGILIGKCTFYPNEYRASKASYTAQEFNLLNDLNNLSVPTETKKLSEEQKKTIIEYAKSAKTLGASTLLKYIAKMIDASVDQIHGYRVDVNNKPEMHTFEVYRKMQSLETISVGELSRNVLDELAHILTLNTEREGIEEAINTKLMGVFSQDQVLELVQFRKNNSSLFSKGWHNFSLKLMMELIPELYETSEEQMTILTRLGKQKNKETSKRTKYIDEKEVTEEIYNPVVAKSVRQAIKIINEATKKYGIFDNIVIEMARENNEEDAKKDYIKRQKANQDEKNAAMEKAAFQYNGKKELPDNIFHGHKELATKIRLWHQQGEKCLYTGKNIPISDLIHNQYKYEIDHILPLSLSFDDSLSNKVLVLATANQEKGQRTPFQALDSMDDAWFYREFKSYVKDSKLLSNKKKDYLLTEEDISKIEVKQKFIERNLVDTRYSSRVVLNALQDFYKSHQFDTTISVVRGQFTSQLRRKWGLEKSRETYHHHAVDALIIAASSQLRLWKKQNNPLISYKEGQFVDSETGEIISLSDDEYKELVFKAPYDHFVDTLRSKTFEDSILFSYQVDSKYNRKISDATIYATRKAKLDKDKSEETYVLGKIKDIYSQAGYDAFIKIYNKDKSKFLMYHKDPQTFEKVIEEILRTYPSKELNDKNKEIPCNPFEKYRQENGPIRKYSKKGNGPEIKSLKYYDKNIPESFINITPSNSNNKVLLRQLYPWRTDVYFNPQTDKYELLGLKYADLQFEKATGKYSITIDKYNEIKEKEGVSKESEFKFTLYKNDLLLIKDTKNNEEQIFRFLSRTMPNQNHYVELKPYDKGNFEGKEKIKVLKMTSNGRCIKGLGKKYLSIYKVKTDVLGNKHFIKKEGDEPKLFFLKYFKKRVANACTMYYNSNCKGRLAQLLKSCRSYKDKASCRIQHPVNYGWVFSFCERGKYDDLENCACLSE

SEQ ID NO: 945 - protein, 1148 aa, Lactobacillus rhamnosus
MTKLNQPYGIGLDIGSNSIGFAVVDANSHLLRLKGETAIGARLFREGQSAADRRGSRTTRRRLSRTRWRLSFLRDFFAPHITKIDPDFFLRQKYSEISPKDKDRFKYEKRLFNDRTDAEFYEAYPSMYHLRLRLMTDASQADPREIFLAIHHILKSRGHFLTPGAAKDFNTDKVDLEDIFPALTEAYAQVYPDLELTFDLAKADDFKAKLLDEQATPSDTQKALVNLLLSSDGEKEIVKKRKQVLTEFAKAITGLKTKFNLALGTEVDEADASNWQFSMGQLDDKWSNIETSMTDQGTEIFEQIQELYRARLLNGIVPAGMSLSQAKVADYGQHNEDLELFKTYLKKLNDHELAKTIRVIYDRYINGDDAKPFLREDFVKALTKEVTAHPNEVSEQLLNRMGQANFMLKQRTKANGAIPVQLQQRELDQIIANQSKYYDWLAKPNPVEKHRASKPYQLDELLTFRIPYYVGPLITPKEQAKSGENVFAWMVRKDPSGNITPYNFDEKVDREASANVFIQRMKTTDTYLIGEDVLPKQSLLYQKYEVLNELNNVRVNNEALGTDQKQRLIREVFERHSSVTIKQVADNLVAHGDFAQRPEIRGLADEKRFLSSLSTYHQLKEILHGAIDDSTKLHDIENIITWSTVFEDAAIFKTKLAEIDWLDAATIKKLSNIRYRGWGQFSRKLLDGLKLGNGQTVIQELMLSNHNLMQILTDETLKTTMAELNQDKLKADDIEDVINDAYTSPSNKKALRQVLRVVEDIKHAANGQDPSWLYIETADGPGTAGKRTQSRQKQIQTVYANAAQELIDSAVRGELEDKIADKASFTDRLVLYFMQGGRDIYTGAPLNIDQLSHYDIDHILPQSLIKDDSLDNRVLVNATINREKNNVFTSTLFASKMAATWRKWHEAGLISGRKLRNLMLRPDEIDKFAHGFVARQLVETRQIIKLTEQIAAAQYPNTKIIAVKAGLSHQLREELDFPKNRDVNHYHHAFDAFLAARIGTYLLKRYAKLAPFFTYGEFAKVDVKKFREFNFIGALKHAKKNIVAKDTGEIVWDKERDIQELDRIYNFKRMLITHEVYFETADLFKQTIYAAKDSKERGGSKQLIPKKRGYPTQVYGGIHGKIRLTWRWLKLLRRKKMSIELSELQLLK

SEQ ID NO: 946 - protein, 1057 aa, Virgibacillus senegalensis
MNKRFVLGLDIGIGSVGWGIIDQNQNILDAGVRLFPEADKSFNESRRSYRGTRRLLRRRRHRTDRVVFLLDEYQIWKKEKNIDYKKYKVTPYHLRMKGLREALTDEELAIALLHLAKRRGIHNLEVSDDEKTSNNELSTYDQVKKNKKLLEDKYVCEIQVERLNKEGQIRGHQNRFQTQDYVKEAKRLLETQSSHNPHITIDFIEKYKELLQNRREYYEGPGFGSEYGWDQDIKKWYENMMGRCSYFPDQLRAVKESHSAQLFNLLNDLNNLTVNREENIKLLPEEKQRIVDSLFMKNKSVSLKKIAKELGVNEHDIKRYRVDTKGRPLFTALTTYHDIKKATNKPAVLESVEAIDEIAETLTIYQSKKDIEQELKKSSLPLNEEEIDHLSNLSYSGTHSLSLKMINLILPDLWQTSKNQMQLITELGYKPKDIDYSNRKYIPYAQIEGYILSPVVKRSFKQTVRIINAIIKKYGVPDEIIIELAREKNSDDKKKFLKDLNKKNESINKQVRDKLEALDIDASKGVFNKLRLWHLQDGICMYSMQPIEIEDLISNPQNYEIDHIIPRSVSFDDSQSNKVLVHKAENQKKGNYTPFQYFHSNKTDVSYDKFKAHVLQLAKSSQKISRKKKEYLLEERDINKFTIQKDFINRNLVDTRYATREILSTLQQFFSENNQHVKVKSINGSFTHYLRKLWDFPKDRGADFKHHAEDALIIAMANHIFEYQSSFKAEHLIFANDDMIDSETGEILSESQFNAAFTEKITKVKSIKHYIDYKYSFKVDMKPNRQLMNDTLYSTRQKGDEEYVVNKLSGIYDKDSQDSVKLKKLMEKTPENLLMFHHDPQTFEKLKQVFEQYSESKNPLNQYYEEEGDYLRKYSKKGNGPVIKTIKYYGKRLSEHHDLSHKFQPKDKKVINLSIKSFRMDVYKDGDQFKFATVRYNNLKEKKDGYHIDEKAYHEELDEKNISPSAIFMFSLYKNDILQLNGELFRLIGINDNKHNKIELNTVSHDYKQYCEQHGIKNNRIIKGISKNTKDFYKITTDVLGNRYISTKEKWKDTFQK

SEQ ID NO: 947 - protein, 1056 aa, Mannheimia massilioguelmaensis
MSVRITNMFKPLNYILGLDLGIASVGWAVVEIDEQGNPLRLIDVGVRTFERAEVAKTGESLALARRLARSSRRSVKRRAVRIKKAKRLLKAENILLSVDEILPNDVWQFRVKGLDHKLERQEWAAVLLHLLKRRGYLSQRKNESKRENKELGALLSGVSTNHQILQSAEYRTPAEIAVHKFQAEDGHIRNQRGDYTHTFSRLDLLAEMELLFQRQTELGNQYTSSKLLENLTALLMWQKPALTGEAILKMLGKCTFEPTECKAAKNSYSAERFVWLTKLNNLRILEQGAERALTDSERFALLDQPYKKAKLTYAQVRTLLKLSDEAIFKGVRYQGEDKKTVENKTTLMEMKAYHQIRKALDGADLKDEWNRLKNDSALLDEIGMAFSLYKTDDDISHYLGGKLSEKVLNVLLENLNFDKFIQLSLKALQQILPLMLQGQRYDEAVSTVYGDHYGKKSAESCRLLPAIPANEIRNPVVLRTLTQARKVINAVVRLYGSPARIHIETGREVGKSYQDRKKLEKQQEENRKQRESAVKKFKEYFPNFVGEPKGKDILKMRLYELQQSKCLYSGKSFDPNRLLEKGYVEVDHALPFSRTWDDSFNNKVLVLANENQNKGNLTPYEWLDGKNNSKRWQDFVARVQTCCFSHWKKQHILSHKLDEKSFIERNLNDTRYVARFLCNFIADNMLLTGKGKRKVFASNGQITALLRGRWGLQKVRDDNDRHHALDAVVIACSTVAMQQKITRFVKYEEGNVFSGERIDRETGEIIPLHFPTPWKFFKENVEIRIFSENPKLELENRLPDYPQYNHEFVQPLFVSRMPTRKMTGQGHEVKLRSARKLDTTGKSIKKEFLTDLTLKNLDNMMNKEREPELYQSLVEHFKKYGDKPKEKFFKKGGTEVKSIRICKTQNKFVDLGNKTIADNGDIVRTDLFLKGKKYYFVNIYAWQVAEDILPRETTTGDLLDDSYIFQFSLFKNDVLEISHPEDENKSVFVYFIRPDDERRWILKFHDNAKIPNIYGKKDETSIRLSIQGQKFIRKYQVDELGKNIRPCRPTKRQNVR

SEQ ID NO: 948 - protein, 1382 aa, Streptococcus suis
MMKKSYAIGIDIGTNSVGHCVMYTENYKVPSKKMKVFGNTEKRYIKKNLLGTLLFDEGNTAENRRLKRTARRRYTRRRNRILYLQEIFAEEINKIDDSFFQRLDDSFLIVEDKQGSKHPIFGTLQEEKEYHKQFPTIYHLRKQLADSSQKADIRLIYLALAHIIKYRGHFLFEGDLKSENKDVQHLFNDFVEMFDKTVEGSYLSENLPNVADVLVEKVSKSRRLENILHYFPNEKKNGLFGNFLALALGLQPNFKTNFELAEDAKIQFSKETYEEDLEELLGKIGDDYADLFIATKSLYDGILLAGILSTTDSTTKAPLSSSMVNRYEEHQKDLALLKDFIRQNLSDSYKEFFNDTLKDGYAGYIEGKTTQENFYRFIKKAIEKIEGSNYFIDKIDREDFLRKQRTFDNGSIPHQIHLQEMHAIIRRQAEFYPFLVENQDKIEKILTFRIPYYVGPLARGKSEFAWLKRKSDEKIRPWNFDEMVDKETSAENFITRMTNYDQYLPDQKVLPKHSLLYEKFAVYNELTKVRYVTEQGKSFFFDANMKQEIFDGVFKVYRKVTKEKLMDFLGKEFDEFRIVDLMGLDKDNKSFNASLGTYHDLKKIVSKDLLDNPENEDILENVVLTLTLFEDREMIRKRLEKYKDVLTEEQRKKLERRHYTGWGRLSAKLINGIRNKTTRKTILDYLIDDGTSNRNFMQLIHDDTLSFVDEIRLAQGSGEAEDYRTEVQNLAGSPAIKKGILQSLKIVDELIGVMGYNPEHVVVEMARENQFTNQGRRSSQQRYKKIENAIKNLDSNLNSKILKEYPTNNQALQNDRLFLYYLQNGKDMYTDEELDIDQLSQYDIDHIIPQAFIKDDSLDNKVLTKSAKNRGKSDDVPSLEIVHKKKNFWKQLLDSQLISQRKFDNLTKAERGGLTNEDKARFIQRQLVETRQITKHVARILDTRFNTKLDDAGNRIRDPKVNIITLKSSLVSQFRKDYQLYKVREINNYHHAHDAYLNAVVATALLKKYPQLAPEFVYGDYPKYNSYKSRKSATERVLFYSNIMNFFKRVVKSSKTGTVKIRPIIEVNKETGEIVWDKKSDFRTVRKVLSYPQVNVVKKTEVQNHGLDRGKPKGFYNANLSPRPKEGSVENLVPAKQSFDTKRYGGYAGISNSYAVLVNGIIEKGKKKSKAEVTEFQGISILARKDFEKNPKQYLLNLGYKDIKSIIKLPKYSLFELENGSRRMLASILSTNNKRGEIHKGNEMYLPDKFVTLLYHAMRVNRTLEPGHKKYVETHRHVFDELLTYILEYNEKIVGAKANGKRIVEAYSARKDTDNLEELCNSFINLLNLTALGSAVDFEFLGTKIPRYRDYTPSSLLKATLIHQSVTGLYETRIDLSKLGGD

SEQ ID NO: 949 - protein, 1367 aa, Streptococcus suis
MVKKKYAIGIDIGTNSVGWSVVTDDYKVPSKKMKVFGNTEKRYIKKNLLGTLLFDEGNTAENRRLKRTARRRYTRRRNRILYLQEIFAEEINKIDDSFFQRLDDSFLIVEDKQGSKHPIFGTLQEEKEYHKQFPTIYHLRKQLADSSQKADIRLIYLALAHIIKYRGHFLFEGDLKSENKDVQHLFNDFVEMFDKTVEGSYLSENLPNVADVLVEKVSKSRRLENILHYFPNEKKNGLFGNFLALALGLQPNFKTNFELAEDAKIQFSKETYEEDLEELLGKIGDDYADLFIATKSLYDGILLAGILSTTDSTTKAPLSSSMVNRYEEHQKDLALLKNFIHQNLSDSYKEVFNDKLKDGYAGYIEGKTTQENFYRFIKKAIEKIEGSNYFIDKIDREDFLRKQRTFDNGSIPHQIHLQEMHAIIRRQAEFYPFLVENQDKIEKILTFRIPYYVGPLARGKSEFAWLNRKSDEKIRPWNFDEMVDKETSAENFITRMTNYDQYLPDQKVLPKHSLLYEKFAVYNELTKVRYVTEQGKSFFFDANMKQEIFDGVFKVYRKVTKEKLMDFLGKEFDEFRIVDLLGLDKDNKSFNASLGTYHDLKKIVSKDLLDNPENEDILENVVLTLTLFEDREMIRKRLEKYKDVLTEEQRKKLERRHYTGWGRLSAKLINGIRDKVTRKTILDYLIDDGTSNRNFMQLINDDTLSFVDEIRLAQGSGEAEDYRAEVQNLAGSPAIKKGILQSLKIVDELIEVMGYDPEHIVVEMARENQFTNQGRRNSQQRYKKIENAIKNLDSNLNSKILKEYPTNNQALQNDRLFLYYLQNGKDMYTDEELDIDQLSQYDIDHIIPQAFIKDDSLDNKVLTKSAKNRGKSDDVPSLEIVHKKKNFWKQLLDSQLISQRKFDNLTKAERGGLTNEDKARFIQRQLVETRQITKHVARILDTRFNTKLDEAGNRIRDPKVNIITLKSNLVSQFRKDYQLYKVREINNYHHAHDAYLNAVVATALLKKYPQLAPEFVYGDYPKYNSYKSRKSATEKVLFYSNIMNFFRRVLVYSKTGEVRIRPVIEVNKETGEIVWDKKSDFRTVRKVLSYPQVNVVKKVEMQTGGFSKESILQHGDSDKLIPRKTEKFYLDTKKYGGFDSPTIAYSVLLIADIEKGKAKKLKRVKELIGITIMERMAFEKNPIEFLEHKGYKNILEKNIIKLPKYSLFELENGRRRLLASAKELQKGNEMILPPHLVTLLYHSSNIHKITEPIHLNYVNKNKHEFKELLRHISDFSTRYILAQDRLSKIEELYDKNDGDDISDLTSSFVNLLTFTAIGAPAAFKFLGSVIDRKRYTSIAEILEATLIHQSVTGLYETRIDLSKLGGD

SEQ ID NO: 950 - protein, 1358 aa, Lactobacillus plantarum
MKEPYGVGLDIGTNSVGWTVVDASGHVRKIKGQTGIGVRLFKEGAAAADRRGFRTTRRRLKRVKWRLRLLREFFDQPISKVDINFFARRKYSDISPRDPNYNGLEKTLFNDRSDQDFYHDYPTIYHLREALMTQHRKFDVREIYLAIHHIVKYRGNFLRNDAATAYRSGTLDLQQHFETLNHLFSQADLELNLNLTTDVALLDSIKQTLVRTDISRSDRQKLIMPLLAVLTGATTAEKKRQKAVVTEFAKALVGNKTKIDVLTLTDIDATEAKDWAFSLEENQDKLPGIEDRFSEVGQQIIDEVIRLYASVNLAQLIPEGKRFSQSMVEKYKRHGEDLKLLKAYIRSQSDAKRGRAIRATYDQYIDGVKSKQVTQEAFQKALGKFVDADVDLNSWAAQIKQAIDSEQFMPKLRIKQNGAIPYQVQQNELDQIISNQKEYYPWLGEENPVIKRRGKFPYKLDELVGFRVPYYVGPLITKEMQAATANAGFAWMVRKADGPITPWNFDDKVDRVASATAFIQRMQTTDTYLIGEEVLPARSLIYQRFMVLNELNNIRVDDGQLTPRQKQRLYNQVFKKHKRVTAKNIQDNLVAAGEFPTAPRITGLADPKVFNSSLSTYHDLKQVLPEAMSDVRKQADIEKIILWSTIFEDSTIFKQKLTEISWLTAAQLKQLGQLRYRGWGQLSRKLLTGLKDDNNRSIMDGLWETNANFMQLRSQPAIENQIKSANQANLTTADLQDTINELYTSPQNKKAIREVMVVLADIKDAMHGQTPNWIFVEAARGGGVAGRRTQSRSKQIVAAYQGTAQAIVSDQVQRELKEKIKNKANFNTRLVLYFLQNGRDLYTGDAINIDRLSEYDIDHILPQSLVKDDSLDNRVLTNARINREKNDTFASEKFGKKMGAKWKEMHRMGLMTKRKLDHLLMRPDEISKYATGFINRQLVETRQVIKLVEELINAEYPSTAIVSVKANLTHQFRQTFDFPKIREVNDYHHAFDAALTAFIGTYLLKRYPKLERFFVYGKFAKQPVNLTRFNVIRKLAKTDTPITDIDTGEVLWDKLTDIKYFETLYDYKRLLVTREVSENYGAMFDQTLLKASDNGKRLIRKKQSFDTAIYGGYTGKTLAYMAIVKVSTKKDVQYQVVGVPTTMVTQIEQLEQQGMTNKQAVTKVIEPLIAANNKKMLTYEVLLPKVRFEQVVRDRIKGQTHRFALGTDTYYHNIQELYLPLTLQRAFLGKQNESEVQLNQNLLTVFDATLAQVNRYFPLYEMNKFKKILNSARDQIELLEAKNQFVKNKLVLGKQGILTNMFIGLHANASYGDLKVLGVKTDFGKLQVPGGIKLTGDAEIIYQSPTGLFERKISLKDL

SEQ ID NO: 951 - protein, 1448 aa, Bacteroidales bacterium
MKRVLGLDLGTNSIGWALIEQDCDAKQSNILGMGSRIIPMSQDILGEFGKGNSVSQTSERTAYRSTRRLRERFLLRRERLHRVLNILDFLPTHYASQIDFKKRLGKFKENKEPKIAYDNKSFLFLDSFNEMLKDFEQEQPNMLINEKGEKKLIPYDWTLYYLRKKALREKISKEELSWIILNFNQKRGYYQLRGEDEEENPSKLVEFHSLTVVDVVPDEPIKGKLETWYSIILDNGWVYRRSSKTELYDWKDKIKEFIVTTDLNYDGTVKTDKEGNVKRSFRAPSETDWTLIKKKTEYEIEQSSKTIGEYIYNTLLKYPEQKIRGKLIRTIERKYYKEELKQILLKQTEFHNELKDDSLYYDCLRELYRNNESHQLFLEKKNFAQLFIEDIIFYQRPLRSQKSLISNCPLEFYKFKDSVGNEKVQHLKAIPKSNPFYQEFRIWQWISNLSIYSKLDDSNFTSHFFDSTDDWESLFEMLNGRKEIEQKQLLKFLLEKKGFKGKSLSSEIEKYRWNYVEDKKYPCNETRSLIQSRLDKVANLPESFLTRHVEQELWHLIYSVTDKIEFEKALDTFSKKYKIDTPTFVDAFKKCPPFKSEYGSFSEKAIKKLLPLMRTGKYWDLDNIDKATKQRIEKIISGEYDKDIRDRVREKAINLLSETDFNRLQLWLAQYIVYDRHSEATSLDKWETIDDIVTYLHSFKQHSLRNPIVEQVITETIRVVKDIWSNYGNGSKDYFNEIHVELGREMKLPAEERKRIQEKNSQNEDTNLRIKALLSEMQNDPNVENVRPYSPVQQEILKIYEEGVLNSNIEIADDILKISKTAQPSSSDLKRYKLWLEQKYQSPYTGEIIPLNKLFTPEYEIEHIIPQSRYFDDSYNNKVICESAVNKLKDNSLGYEFIKGYNGQIVECGFGKKVKIFSIDEYEDFVQKNYANNRSKASRLMMADIPEKMIERQLNDTRYISKYISNILSNIVRSESNDDGVNSKNLISVNGKITTVLKKDWGMNDIWNDLILPRFIRMNQITDSDSFTTWNERFQKFIPTVPIELSKNFSAKRIDHRHHAMDALVIACATRDHVNLLNNLYAKSSARYDLNRKLRIFEKTTYKDIKTGQIIEREIPKAFLKPWQNFTTDAKDAIESIIVSYKQSLRVINKSTNYYQKWVEKDGIVKKEKIKQEGKNWAIRKPLHKDTVSGLVQLSWVKVPKGKVMTATRKSLDSSFDLKTIATITDTGIQKILIKYLESKGNNPESAFSPEGIEDFNNNIHLYNDGKKHRPITKVRLYEIGSKFPLGEKGNKNAKYVEAAKGTNLFFAVYANNKGERSFETIPLNLVIDRLKLGLSAVPETNEKGDNLLFHLSPNDLVYVPSEDEMENLKLINLEHISKDQLNRIYKMVSSTSNRCFFIKSEIALSIVNKIEYSPLNKMEKSIEGIMIKDVCLKLQVNRIGNLERYFS

SEQ ID NO: 952 - protein, 1100 aa, Corynebacterium lactis
MTTRYVVGIDVGLFSVGFSAIEVDEKGMPVRLLNSMSLIHDSGLDPNSQKEAKTRKAVSGVARRTRRLYAARRKRLAALDTFLTQHDFPLIDLEKEADKIAWSARATLATEKVEDHEQMKKLLSIAVRHIARHRGWRNPYIPAERLCTQRKASDKFTILEQKAREAARKPIPSTPTLAQLVGALPHGATQLRGENGFLSETLNQQDFANELLKIASVQDLEPQFVHELLLKVFYAKSPKGSAEKFVGKDELDPSQPRAWRATLAFNEYRIISLLANVRIADPSSPTFAQRRLTVNERQKAFNFLNNWTQKTSPTWTDIAELFGIDRGLLKGTASANDDGERMSATPPINQTHQIMWNCQVKSLREFWRKGSTAMRSALISELSNVEAPEEGSPESIAAATAIRSLPPEEMEKLETVKLPHGRAAYSVKTLDKIAKYILNNEADLHEARQEIFGVDAHWKPAAAPIAEPTGNPAVDRTLSAINRWILLAEKRWGTPLSVNIETARDGFKSASVAREIERGNSKRATRNLETRQAIAEKLGIEGRVRSSDMLRYQAIQRQNGQCAYCGTTITFKSAEMDHIVPRAGAGSTNRRNNLLAACHRCNLSKGKLPFAVWANSEKSGPSVSLEGAIDRVNQWPTDSGLSTREMRDFQQSVIKNLKRTSSDDKIDARSIESVAWMAIELRHRMISHFAKQGRSTPKIRVFSGTVTASARKAAGIEKQITMLGGGHGKNRLDRRHHAIDAAVVALMNYTTAQTILERENLRRAENIIQKPDTDFGTWKEYKGRNQQDRYLFEQWNLRMKSAVPMLQEALDQHRIAVTQNLRLRLGNGQAHEAGIGKLDSAKVGDALPVALIDRAASPALWCALTRLPDFDWKDGLPENPTRSIVVNGTHLNSEDKIEFFGVKAGAIAVRGGYAELGASFHHARLYRVPVGKRHAYCMMRVYTVDLVRHQHEDLFTVDLPPQTISVRQCEAKLRKALREGTAEYITWFVVGDELHFDASKVATGQAETFLAEFGDIRSWTVKGFYSDARLRLKPAVLSAEGITDEMDTDCKKVIDSPGWLPAVNKIFGLGGVTIVRRDAHGRPRLSARGNLPVSIQIDSL

SEQ ID NO: 953 - protein, 1055 aa, Staphylococcus agnetis
MNNYILGLDIGITSVGYGIVDSDTREIKDAGVRLFPEANVDNNEGRRSKRGARRLKRRRIHRLDRVKHLLAEYNLLDLTNIPKSTNPYQIRVKGLNEKLSKDELVIALLHIAKRRGIHNVNVMMDDNDSGNELSTKDQLKKNAKALSDKYVCELQLERFEQDYKVRGEKNRFKTEDFVREARKLLETQSKFFEIDQTFIMRYIDLVETRREYFEGPGKGSPFGWEGNIKKWFEQMMGHCTYFPEELRSVKYAYSAELFNALNDLNNLVITRDEEAKLNYGEKFQIIENVFKQKKTPNLKQIAKEIGVSETDIKGYRVNKSGKPEFTQFKLYHDLKNIFEDSKYLNDVQLMDNIAEIITIYQDPESIIKELNLLPELLSEKEKEKISALSGYAGTHRLSLKCINLLLDDLWESSLNQMELFTKLNLKPKKIDLSQQHKIPIKLVDDFILSPVVKRAFIQSIQVVNAIIDKYGLPEDIIIELARENNSDDRRKFLNQLQKQNAETRKQVEKVLREYGNDNAKRIVQKIKLHNMQEGKCLYSLKDIPLEDLLKNPNHYEVDHIIPRSVAFDNSMHNKVLVRAEENSKKGNRTPYQYLNSSESSLSYNEFKQHILNLSKTKDRITKKKREYLLEERDINKYDVQKEFINRNLVDTRYATRELTSLLKAYFSANNLDVKVKTINGSFTNYLRKVWKFDKDRNKGYKHHAEDALIIANADFLFKHNKKLRNINKVLDAPSKEIDKKRVTVQSEDEYNQMFEDTQKAQAIKKFEIRKFSHRVDKKPNRQLIKDTLYSTRNIDGIEYVVESIKDIYSVNNDKVKTKFKKDPHRLLMYRNDPQTFEKFEKVFKQYESEKNPFAKYYEETGEKIRKFSKTGQGPYINKIKYLRERLGRHCDVTNKYINSRNKIVQLKIYSYRFDIYQYGNNYKMITISYIDLEQKSNYYYISREKYEQKKKDKQIDDSYKFIGSFYKNDIINYNGEMYRVIGVNDSEKNKIQLDMIDISIKDYMELNNIKKTGVIYKTIGKSTTHIEKYTTDILGNLYKAAPPKKPQLIFKRGME

SEQ ID NO: 954 - protein, 1350 aa, Enterococcus cecorum
MNKYYLGLDMGSASVGWAVTDENYHLVRRKGKDLWGVRTFDVAQTAKERRVTRGNRRRQDRRKQRIQILQELLGEEVLKTDPGFFHRMKESRYVVEDKRTLDGKQVELPYALFVDKDYTDKEYYKQFPTINHLIVYLMTTSDTPDIRLVYLALHYYMKNRGNFLHSGDINNVKDINDILEQLDNVLETFLDGWNLKLKSHVEDIKSIYNRDLGRGERKKAFVNALGAKTKAEKAFCSLISGGSTNLAELFDDSSLKEIETPKIEFASSSLEDKIDGIQESLEDRFAVIEAAKRLYDWKTLTAILGDSSSLAEARVNSYQMHHEQLIELKFLVKEYLDRKVFQEIFVSPNVANNYPAYIGHTKINGKKKELEVKRTKRNDFYSYVKKQVIEPIKKKVSDEAVLTKLSEIESLIEVDKYLPLQVNSDNGVIPYQVKLNELTRIFDNLENRIPVLKEIRDKIIKTFKFRIPYYVGSLNGVVKNGKRTNWMVRKEEGKIYPWNFEDKVDLEASAEQFIRRMTNKCTYLVNEDVLPKYSLLYSKYLVLSELNNLRLDGRPLDVKIKQDIYENIFKKNRKVTLKKIKKYLLKEGIITDDDELSGLADDVKSSLTAYHDFKEKLGHLDLSEAQMENIILNITLFGDDKKLLKKRLAALYPFIDDKSLNRIATLNYRDWGRLSERFLSGITSVDQETGELRTIIQCMYETQANLMQLLAEPYHFVEAIEKENPKVDLESISYRIVNDLYVSPAVKRQIWQTLLVIKDIKQVMKHDPERIFIEMAREKQESKKTKSRKQVLSEVYKKAKGYEHLFEKLNSLTEEQLRSKKIYLYFTQLGKCMYSGEPIDFENLVSANSNYDIDHIYPQSKTMDDSFNNIVLVKKSLNAYKSNHYPIDKNIRDNEKVKTLWNTLVSKGLITKEKYERLIRSTPFSDEELAGFIARQLVETRQSTKAVAEILSNWFPESEIVYSKAKNVSNFRQDFEILKVRELNDCHHAHDAYLNIVVGNAYHTKFTNSPYRFIKNKANQEYNLRKLLQKVNKIESNGVVAWVGQSENNPGTIATVKKVIRRNTVLISRMVKEVDGQLFDLTLMKKGKGQVPIKSSDERLTDISKYGGYNKATGAYFAFVKYLRGKKIIKSFEYVPVYLAKKIDNDSKLLQEYLTTEKGLKDVKILVPKILINSLFKYNGSLIRIPGRYDKKSLVVNIDSPLLLDSTYISQLKVIESYMYKKRNAKSKDTEILLTKYALEQLQDLDSLFDVIAYKLNESIYCVVDDKYGKLMKCRDNFISLDKETKCEMIYELLRLFQCNSQLANLTKIGATSKFGSIIISKNLKDTDKMSIIHQSPSGIFEHEIELTSL

SEQ ID NO: 955 - protein, 1010 aa, Kiritimatiella glycovorans
MSDSSYVLGLDLGTNSIGWACVRLNKGKPDGLLAQGVRIFEAGLEIDAYGRGTPLNTERRNARQRRRLHDRRKRRILKVRRILQEAGMLPANKPDHKDAEWKMLLARNPYRLRAKALDEQIDLKEIGLCIYQFAHRRGFLSNSKILKKDDDRGKLKDATKAFAEDMEQKGARTWGEYLSHLDPHEQRIRTNYTLREWYTSEFDLIWEKQQSFYPHVLTDDLYKRVKEALFYQRPLKSQAHLLGQCELEPGRKRAPFALLMAQEFRLLQSLNHLRVVSSTGDERLLTDEERKQALALLRSRGNQKFTTLRKVLNLRGTKFNLERGGEKTIQGNNTAAALGNLFGEAWDHFSSEQKNQIVEDRLTIGDTDALIRRMKKTWGLDSVTAEMFSETELEDGYCGFSRKALEKLLPLLERGHALMEAVQAAYPDYQKNLPRTDTLPPLENLRNPIVQRTLSELRRVVNAIIKEYGKSDKIRIELARDMKQTAKNREKSWDRMRVRERQRKEAAKKILEETGNPAPRRHEIEKVLLAEECNWECPYTGKRICMNTLLGDAPQFDIEHIIPFSRSFDNSFSNKTLCDVNYNRNVKGNKTPYESASETEHEEMVCRVKRFTGDYKEIKLDRFNTRETDSRADFIEEFSTSQLNDTRYASRLAGEYLGKLYGSEWRKHIQIAKGGTTKYLRDAWDLNRILSDGGTKSRDDHRHHAVDAVVVALTTPQTVKALSDANQRAPEHRRYAFSDMPLPWETFRQDVEQAINSITVSHKVCRKANGQLHKETFYGLIKDRKTGDTRTVLRKPLHELTDKEIKRAEIVDSSIRKLIEQKLKDLDQPPKTAFKDRNNHPFIIDKNGNKRFIHKVRVYQDAKPVKIAENRHVKLGGNHHLEIFEVIDKKGNPTWKCEVISLFDTRQRVKEKRPVIVRQDQNGNPLKFSLSIGEAVQLDWNGGRETAVVQKMSKTPNTVEYVFRKHNDARKAADIPYKETITVKSDSALFASNLQKIVITPTGLIRRAND

SEQ ID NO: 956 - protein, 1138 aa, Actinomyces meyeri
MSASSENIRGIRYRVGIDVGLRSIGFCAVEVDQRDQPVRLLNSMVFIHDAGVDPNENKAAKSRKLTAGVARRTRRLYLTRRQRLSNLDRVLAKEFGWPILDLSRFKDPLEPWHVRARLLEGYVADDEERQKALSIALRHIARHRGWRNPYANVRTLLQPTEPSDFLMGLNERISTALGRNFAADTAPGQLVDAYLAHPDYAAKAGTPKLRGPKGILAGKLHQSDNAAEIRRICDIQKISPDDRDRLICAVFEAKSPKGSAKERGLVGYDELPGQSGHVRAEKAHPAFQKFRIVSVLANLRIREGRVERPLTPDELQGLTDYLMVAGLKQEITWQDLADNLGIERADLRGTAKASFDNSPVLRRPPTDVTTEKIMACKVKWLKEWWKEADEEQRGYVVDAFSNSGGSEDTTDVNDEAAELFERASEQDQLEFEKIALPQGRAAYSLDSLRRLTERMLTEGVDLHTARCLEFPGGNDWRPPVEEIGAPTGNPAVDRVLKQVSRWLHAATDRWGEPTVINIEHARDGLGSERVARELMRANERRRKANAAAVAEMTAQLGISGKTRRSDNIRYFALQRQDCQCLYCGTMITYETAEMDHIVPRADGSSTNDRSNLAAVCRTCNHKKGAIPFAVWASSEDTNEGVSLKGALERVRMWKQESGMSSKQLKQLKREVSARLKSTKLDEEFDGRSMESVAWMAVELRTRIEGHYRKRNESTVPSVGVYRGQLTAEARKASGFENRVNLIGGRGKTRFDRRHHAMDALVIALMNPSVSRTLALRLNMRDAQRLTGREETWKNFCGKPGEATQRFEAWRESMLRAVELFNIMLSENAIPFVENIRLRVGSSVVHDATVHSFCPSRTPEGEQIPTKVCGEQYPLGSALPVELIDRAETPALWTALTRCPDFDPQKGLPEDPHRVISVNGTRVAPTDLLNFFGSSAACLKVRGGYAELGSAIHHARIYRIDGKKATYAMVRVFQVDLLRLKSQDLFTTPLKPSTISMRTAEPKIRKALAEGTATQIGWLVEGDELRIDTSKYTGGFVGDVLARYPETTSWRVAGFKTPSRLRIKPLCLSKEGFVDEKQAARLGVEATTEAIIKTVDTPGWLPAVNVLFGAGGVYVVRRNCLGEERHRPSSSLPVTTILE

SEQ ID NO: 957 - protein, 1056 aa, Ottowia sp.
MPKQKSTRYRLALDLGSTSLGWAVLRLNEQHEPNAIIRAGVRIFSNGRNPKDGSSLAVTRRAARAMRRRRDRLLKRKARMMNKLVEYGFFPADVAERKKLERINPYELRAKGLDAPLTPGEFARALFHINQRRGFKSNRKTDKKENDSGALKAAISHLRQQLHERKARTVGEWLWQRLQAGLGTRARYRESRVAQANGKTRIEKSYDLYVDRQMIAEEFDALWAAQAAFNPQQFSEQARGELRDVLLFQRDLRPVRPGRCTLLPDEERAPLALPSVQRFRILQEANHLRLLHPDLREEPLSLAQRDAVVDALEHNSKRTFEQLRKLLKLNGTVKFNLEDEKRKELKGNATSATLSKDGLFGENWWNLDEALQDAIVWQLVSEQSEEKLQNWLQANTGVNATQAETIANAGLPEGYGSLSYKALARIIPALRGTEVANGIDVPRTYDQAVQAAGFAHHSDLDSGFDFEHSHDEVERIGERVIASTGEVKPVFAFKQLPYYGKALRRHVAFAKEHPRNEEERYGKIANPTVHIGLNQLRVVVNALIRRYGRPTEVVVELARDLKQSREQRQEEQKRQADYQKRNEHIRREIASMHGCAEERVSHADVQKWILWEELSFDVADRRCPYSGVQISAQMLLSNQVEIEHILPFSQTLDNSLNNRTVAMRQANRIKGNRTPWQAREDFERQGWSYDSILQRAERMPKAKRYRFSRDGYERWLKEDKDFLARALNDTRYLSRVAKTYMELVCPLGTRVIPGQMTALLRAKFGLNDVLGLNGEKNRDDHRHHAVDACVIGVTDQGLLQRFAQASADARGNGLEKLVENMPVPWATYRDHVKRAIQCIWVSHKPDHGYEGPMMEETAYGIRKDGSIRQKTKADGSTGREITHLIRITEPTQNLRHGVDAQGQPLAYKGYVGGSNDCIEITQNEQGKWEGNVITTFQAYDIVRRLGSKQGPRRLRHPTLAQTLDVYGKPKKLVMRLMIDDCVRLELDGNKKTLRVVKITGNGQVFMAPVHEANVDKRNSDKTDPFAYVSKYAGSFQKAKARRITISPIGELHDPGF

SEQ ID NO: 958 - protein, 1070 aa, Spiroplasma turonicum
MKKVNIGLDIGIASVGWSIFDINNKKILKSGSRLFNEANAGTNKSSTTADRRMQRGRRRNLRRKILRKRDLLVLFKKYNFIKNEIDFYNLDFNHNFLELRTKALKEKITIDQLMVILFNYIKKRGSFNFKDDLLERKNIKMDNLSLDQINVQENILPLEIQQKNYLDHGKYRGLKTEDSLIAHEWYKNELIKILDIQISNNLISESFKEDYLNLFDRKRLYFEGPGFTTSSRIEKSKYGWKDEEEFYSRLSGYDTYDSSEKRAPKHSMTSYLFNILNDLNNLKIEKFNDGLSYEQKYKIIDSVINHDGNKNKNITLKHIAKLIDVEESSIKGYRIDKDSKPNFTKFEFINNLRTVLINSKLDYSFINLNNVKLLDEIANILTTFQTADSRKAKLLSINSFDLNEDQAEAISLISLSGTHSLSYKTMNIAIEEMWYENKNHMQIFSEKNIKPDYNIKINRRFNSMPLLKRKISDMYISPVVKRSLIESIKIIKEIEKMDEYEIKDIVIELARESNSEDLRKHITEIQKKNEKENNEIINKHNISTVRKDFKTKLKLALFNEQDGKCAYSNKEILLDRLLNDPNYCEIDHIIPFSVSLDDSRANKVLVLWSENQQKGKKTPYKYFREINRDWLTFKTLAYNHYIKNKNFGKYGHKKYENLVFEDDIDNDEVKQSFINRNLNDTRYATLEVKNYLTYFKKELNKSYSIKTINGSFTHYIRNNYLHLPKKDRDDFKHHAIDATVCAIAPLIDIIEGKTINSLSNEELSQDQIIKKEELNNLIKDILTFDYKITKKVEKKSNTMLFNDTIYTCKNINNQLYKVEKIDLLTLDNAKLKTLKSLFTTDMHKLSIYESDKKTYEYLKKVFDAYVNDVDIDNKPVKNPFYHFVYELKEKLVKQSNETNPPNIRYLKYIGKKVEKYTSITHKFKNVKRNKEIVMTGSNTLGWDLFYSEKYNLYKILPITHEVARFKTNDYSSDVEYKIKDYEIMKEKLNIDNTYIKKYTLNKNNELIFNYDNNLFHLIVIGYARNTERLEFKYLDKKTSSEKRITYAVKKMKNIKLITTNSTRTKIKVID

SEQ ID NO: 959 - protein, 1141 aa, Lawsonella clevelandensis
MRTTLDPIPTLPVEGSYVVGIDAGQNSVGLFALALTAEGVPHEILAMQSVIHDGGLDPDKAKSNQTRKASAGFARRARRRLRVEKKRLNKLDKLLDAQGWHGRQEAEFPTQIWEDRYRATSSYIEDDEERAQVLGEVFRHIARHRGWRNPYQPLADLFDDESQSDAFTRLVSNAQRVGARVDDSDTVGAIVWSALQCPHPVGLDPEDEARWANSNQLRIRTLGTESKKRPGLIDGRLFQVDNVHEIQRICATQNIPAELEEQLLGTIFDQNKASAGVMQTVGRCGLQPQLLRCSKAHPEFQRYRIAATLATLKIKEGHSARFLTAEERQKVAAELHNPHTTIATWGDVADLLGIEAPQLTGIASTTPDAELIVAARPPVDTTAIKMATKAKPFLKKWWNDAAPEQQQDFIELQVNYDTDSPDVNNYLLTLTPTELAEIETFSTKELPKGRASFAAETCRILADHLLNSDDSLADAIEMNFHRKPTVAQLTESTGIASVDRSLKIVSRFLQMARNYWGEPQAITVELAREGLMSAKAKADMEFQQRRARKARQTLQEKRGIREDNRRDTLRAEALHRQNNRCLYCGAPIDMHSVEMDHIVPRSGPGATNRVTNLAGSCHRCNQAKGGRTYAEWVKQDHPTYTNRKMVDDFVNHSMNLENQALPKKSMQKEYLRALHTVGKEDALDSRSLAPTATMGTILRGRLEAEFPETKVNVLAGFITAEARHAAGYWGLPTLHIEGDPHDNNKRIDRRHHAIDAAIMSITRPYTAQVLAQRKALRDQEKTLGSSYRSATVSNFYGSWKDFQGTDIAHKTAYQRWLSNSQVLIGLVAEKLLNDDIPVWTPLRLSRTSGRAHEDEIRPLAHRPVKAALTAKEIDASATEAQWCALTRCEDYDENTGLPENPERRIVINGTHLGPNDDLEFFTPKDNKKPDAICDQAALKVRDGWAAAGDFHHLRLYRIPQKKGFAYYFMRVLPFDLPTEGDLFSYELPPQSISIRQAHPKLKAALKKGEAVYLTWLVKNDVLEVDDKALGGIGKTLEEVIPNATRRWRVIGFDNSTTTIKLAPVLTSPEGVMSKQGGSSVDSRFDEATSRKLKQTVLAPNGWRPSAQVLMRGPLRVIRYDALGRERLSARSPLPFTLIIEP

SEQ ID NO: 960 - protein, 1096 aa, Pannonibacter phragmitetus
MKNIFSFDIGTNSIGWAVLALDGNGDPVRIADAGVRIFSDGRDPKSKASLAEARRMARAMSRRRDRTLRRKRATLRTLAEIGLMPDTSSARQAQLRETSDPKSGSGQLTRNPYALRALALEEKLPLFHIGRALYHLGQRRGFQSNRKTDRKDNDKGKIALGIEELHAAMRQDGAQTYGQWLARRHALGQAVRLRSGALDLEGEGYAFYPERKLLEDEFHRIWEAQARHYPDILTPERRDHLFTVMFFQRPLKKPKVGKCSFNNQEERLSKAHPLFQEFRLYKEVNELEIVEPDLTHKKLTLDQRNALVKKLQVSREASFAALRKVLKLRPDQRLNKESESRTKLKGNEVYAVLSDKTRFGPRWGTFSQAEQWAIIERLKEEEDPGRLFAWLRSAFGIEGEQAADIANVHLPEGHGRLGKTALEAMLEELKAEVITEAEAAKRCGYDHARLGGGSDEGEPELPPYQEILQHRIPPGTNNPDDPYDIEKGRFTNPTVHIALNQLRHVMNTLIRRYGKPAQIAVELARDLKLSERQKEEVNRTIARNTRDAERRGKTLEENRIPNTGYNRTLLRLWEELNPGKVEDRCCIYTGKPISISMLFSGEVDIDHILPWSRTLDDSHGNKLLCLREANRVKRNRAPADVTEWRDNYDEILSRAARLPQNKRDRFAPDAMERFEKAGGFLARQLTDTQYLSRMALEYLACLFPAEEMDGFGELRRHRYINVCPGRLTEMLRRNWGLNSILSDSQLGETAQEKNRKDHRHHAIDAIVIGVTGRSLLNRISYAAGRLEAQQLETLVKEAAATNKPWDGFREDVAKVVGGIIVSHKPDHGTAGRKAKDPARQQTAGRLHNDTAYGLTGETDARGNTIVVRRKPFLSLTSKDIPSIRDEALRAVLEQHLRGIPDGKAFQAALDAFRKQKGFHHYHGIRHVRLTEPLSVIGIKDRDGKVYKGYKGDANQRYDVWETLDGKWHAEVVSMFDAHQPGWQSRFHAENPTARRVLRLQQDDMVALNAPDGGRLLVRVVKFRQNGQITFAGHNESGNLKARDAASNEQDPFKYISRMASSLKDCGCRQVRIDATGQVFDPGPQDRASRLQKQSKR

SEQ ID NO: 961 - protein, 1524 aa, Salinivirga cyanobacteriivorans
MTRILGLDMGTNSIGWAVVDKEQEQIEDSGVRIFPEGVVNKNEGEGREKSKNALRTENRQIRRQVARRRFRKIKLLELLIEQDMCPLTKDQLMVWKHWDKSKKSEGRHFPQNERFSEWLTLNPYDLRNRGVNGELTKMELGRLLYHMIQRRGFLSSRKEKDTGKIYTGKENMVGIDDTKEALNSNTLGEYLYSIYPEDNESFQNMRDKKGDDLRIRGRYTLRDMYVEEFEKIWNQQAKRLGLDKVNVTKKKIVFLNGGKTRNRNAKKIEYLKKHRDKVDIDEIIIRRENANKKLTRVTSYKNISLHDHLGGRIELQDDKVKFDNKDSVLFYQRPLRSQKKLLGKCRYEKNKTPVSISHPDFEIYRAWLYVNTIKFGNNIPLPLEQKQKIIGYLKTKKSAVKFADIIKLLQMSHENFNYKDDDKVEGCPTIAQLSKLFSGSGWTQNYHNIWHDFYFYDDSELLFKKLSNAKAYELKDKITLDDIKKISIKDDAYARISLKAVRNILPFLKRGLLYNQAVVLGGVKNAFNYKVQSDEVPRWDRFEDDHDTIVKDILSIINQKNKQGETIERIKEYLTNPINEYGFEQNSPALKKLYHHSQEIEEKEKSDKISEIENLRNPIVQRAVQEMRRMVNELLKKHGKFDRIVVEMGREMKLGKKGRNELSRAIRQNFEANENVREILKEYQLAPSRQNIQKVLLFNEIQDKTGKVICPYTGKALNISDLLGVGNKVQIEHIIPRSYSQDDSFANKTLCDAKFNQLKGNLTPYQFYLKNSDKKLWGAASWDEIEQRAYNILHFNKAKRFTTKKLEWKTEEFISRQLNDDRYISRKTKEVLSEVCNEILVMPGAVTADLRRLWGLNNILQPTIGLPKDNFDIDENKSLSYWAVTDENKNIRKLYPTNNPRPDVAEGETVVAGNVTKNKFKSQRLNLEFDAPEIPDGKYYVKFPVSNPVETIRQYIEKPEYADNEVILRGLINRNKFKHDSLKQRVDVNENLEDGKYWAKFKIIDKGFEIPEKNKRPENKNGICLFGKVKDNHFTSYIYQCETDLKDGQYWVLLDLDFDNVEFIPTKNKKPEIRENQILVLGDVNEEKKFTAIHDMQLQFDWDEKPGRYWAVLNILSAEPEFTAIENKPPEIDDNEKLIEGKVWVDHKTGEIRFDPKKNRDDHRHHAIDAITIALTDYNIINQLNRYNAEKDTLQKGNAAEKPSFDEPWDGFFKQAKQIAGNILVSYHKDNTVTKKVKMFIEKNGKKFLSEGQAVRGELHKKYIYGKRKPPMGEQSFHKRKFLKDLKDNQLDKIVDENVKRIVKHAREREKILKAQITALQKDRTKAGDIEEKNIDEQIKSLEEEIRLLYTLPNKNGDRVPIKKVRIRENLGNTEMLKPSENVNQYVNPRNNHHVLIYRDNEGKLRESVVTLWEAVERKSQKEDVYQLPPDGKEKVTTLEVNDMFLLGLDSEQANNLLTIDKKILSKYLYRVQKVSGGDYSFRFHLASTLNKKEEEIRIASFTAWEKVHPIKIKINILGQIEKI

SEQ ID NO: 962 - protein, 1441 aa, Salinivirga cyanobacteriivorans
MKVLGIDMGSNSIGLSVRNPELGNDLENQLEYFSSVIFSSGVGNGKTGEYSYAAERTKYRSSRRLYQSRKYRKWETLKVLRYNKLCPLSESGLAQWSIYNKAKGLYRKYPVNEQQFEQWIKLDFNGDGKPDYASPYQLRDELMNRQLDMKNAIDRYKLGRALYHIAQRRGFKSSKGETIKEQENLENNSIESKPDKDIIRELKKSEDNKSKELTTYMKENNLKTVGQAFALLERNGIRIRGGKYQAIRSQYKEEVYEIFKFQQALSTDSDLFDRIISERKEKGSIFYKKPLRSQKGLVGLCTMERKIFFDKRNNQKIEKGKPRCPISHPDFEEFRAWSLINNIRYRRNAEEEWQSLALEDKHDLFNEKFLLTRSNFKFEDIAKWLSKRFGIALSYKDKTLNYKEKTNVAGCPISGRLKNLLGDNWKSMLIPVDKEKVNRTTGEVKKITYNYEDIWHICFSYDESEFVYEFGIKRLGYNEIKANELVRIWGAIQQGYGMLSLKAIRNINPFLKQGYPYTEAVLLAKIPELMGSHKWEKYGQLVEKSISDIIVKNRFEKRILNIVNNLIGNYKSLQYNDEGFATKEVNYLLDEKDKEQIEEFCIANYGAKSWSEMSVEKRGVVLDVVREDYQAFFKTEKRDFFKIPKVSDALKEFLSKKFEMFRCENYEEYSHQNNCKCDACKKLNKLYHPSQIAFYPPAIAQSFNYNGVQLSMKLLESPVIGSFKNPMAMKALHILRKEINKLLKEGIIDEDTRIVVETARDLNDANKRWAIRKYQGEREKENDEISKIIQTYFNTNRKISNDEIQKAKLLIDQHEIPVEDGMFEKNVKKYKLWLEQGCRCIYTGKPLNLTSLFSENNTTDFEHTIPRSKSFDNSLANLTVCDAYYNRTIKKNKLPFELENYEKTARIGDEEYPPIKDQLKHWKKKVERLQDNVNNWKFKAKRAQDKPAKDFAIRQRHLWEMELDYWKNKLERFTMKEVKSSFKNSQLVDTRLITKYVFHYLKTVFNSVDVQKGEVTADFRKMLGVQKAYEKKDRTKHSHHAIDAATLTLIPKSAKREKMLSLFYKIEEHKKLNKDTPELQEELNKERLSCNFNKVKNMVPFIEDKILIKHESKNQALAPAKKVVRKRKKIVKVKNNRGEKVSMVAKGDSIRGQLHEETFYGKIKALDKKDEFWMVGRKKIEELNPKTDIIVDKALSEHIHQQIDNGVELNKLKDKAGNTIRHIRCRVKAGRGFLSPDDVTTVKQQTYLSRYDYKNYYYANSGDNFGFALYVDENKKPLKIIPKSLFEVSKQDIDEHKKIEDYFERNIMVGRGQRKKIGELYNVFQVGQHVLFYVDDKEELKHTDNLSSHLYVVKTLFDGKTGRIQFQHHLEARTDEQLIRDFPDKDENGKKLFGKAGKNGFSSFGLDFIRPRLLLTVGKLNCIYEGKDFEFKADNQIRFFF

SEQ ID NO: 963 - protein, 1128 aa, Lutibacter profundi
MTKILGLDLGTNSIGWAVVDEKKEKILGMGSRIFPEGVVNIGEGEGRETSKNASRTDARGTRRQFFRRRLRKRYLLRELAKKGLCPINYTLVKEWNEAQIFKNKQLQEWFKLNPYELRSKAIQEKISLEELGRIFYHFIQRRGFQSNSRSAGVDNIEKSVIFKGDTKTGKIGISETLESIKNTKTLGSYLHTIYPKQNKPYSGHKERIRNRYTTRQMYIYEFETIWEYQKQFYSELSNELKTVLGGRKKDGYKEDGILFHQRPLRSQKHLVGYCSFEPKKTKCQINTIPFELFRIYQWVNTVDCNEKVTSEDRGKMVELLLSKEKVSFKEIRKVINKSDGYYQFNYKNDDKIVGSYTISNLSNKKFFGKKWFDFSDKEQEDIWHVLSFFDDRDKLKQYAIKYWGFNEEKAVKISKFNLKEGYSNLSRKAIHNILPFLKLGFMYDVAVGLGGVKNALADKWIENEQFILDNVPSVVRSNFKGGYIEPLKQMLKYEFDVSDKQLLKLYHHSSAIETTELLKKLPINSEADKEIQSIKNPVVITALFEIRKLVNEIIDTYGKFDEIKVELARDLKASKSKRYDTRREQLRLEKENDRIKIELENLGQRINHITILKYKLWEECDKRCPFTGKNIEVNELFSGEVQIEHIFPWSRSLNDSFMNKTLCFADENRAKGNKTPYEFYSEQGEQKWEEIKIQALSCFKNKPNYPNAYQKFKQFVKKKHDEDFISRQLNDTRYISKEAKNYLSKICNNVQVAPGQMTATLRHKWGLNTILNKDDDTKTRDDHRHHAIDALVMACSTRSHLQELSKRNRYQKDYEFKDFPMPWQFFRQDAEKSVEQILVSHKKLNTILTVRTHKTKKNGVVYKNIGVAARGQLHKETVFGKRTAPDGIEAYHVRKPIESLSTHKHINKVVDETIRLLILKQVNKLGGFVKGKIPEGTFYNTDENGNKQPQIFLPNKNGNPVPIKKIRLRENIGGAEQLKSTVNQHVNPRSNHHVLIYKDFDDNLKEKVVTFWTAVERKKQKQAVFQLPENGKEIVTTLQINDMFLLGLKDDEINWEHPKFTLLKEHLYRVQKFTSGDYYFRKHIESNLNGELGKAYQYIKGFGEGKTGWKTFNPIKIKVSVSGKIEKV

SEQ ID NO: 964 - protein, 1486 aa, Flavobacterium columnare
MTKILGLDLGTNSIGWAIREDENEGVNQIIDKGVRIFSEGVKSENGKEISRAAERTAYRSARKIKYRRKLRKYETLKVLSVNGMCPLSVEEVEQWKKSGFKEYPLNPEFLNWLRTNEDKNINPYFFRDKASKQKVTLFELGRALYHIAQRRGFLSNRLDQSAEGVFEEHNPQIQNLIEDLDSSNTILNELKEYYINLGIIDESEKSGFKKDLDEGEKNLKKLYTSLVSITKKNANDIETCKQELIARLNKKEDLGKVKGEIKDISQAMLDGNFKTLGQYFFSLYNKTRIRNQYTSREEHYLEEFIIICQTQGIEEINTNEKLPEKKFTGLAKDLYRAIFFQRPLKSQKGLIGKCSFEKNKSRCAVSHPDYEEFRMWSYLNTIKIGTQSEKTLRFLTLEEKLKLVPKFYRKNDFNFEVLAKELVEKGASFGYYKSSKKNEFFYWFNYKPTDSVSACVVSASLENAIGKDWKTKTFEYQTSNTKKEEVTKSVNYKDLWHLLSVATSDTYLYDFAIEKLKLEPKNAKAFSKTKLKKDFASLSLAAIAKILPYLKQGLLYSHAVFIANIENIVDADIWKDKEQQKFIQSKIVDLIDNYLVEKSKLEIINCLLKIYNTEDIEGRKVYYSKEAESLFEADLRKKLVPFYKANTISEQQEQEIIFKDLFPVLIEQLKKQEFIKIVRLDKKIEAFLKGENEEGQIFCNYPEKFKKLYHPSDIEVFKKKIIKDEWGNEKVVLGSPLTTSIKNPMAMRALHQLRKVLNTLILDGQIDEKTRIHIEMARELNDANKRKGIQDFQKEREELYKIYEAKIKELYQVKTGKELLHVTDEDLQKFEWALEQTKDGRIITKEELIKYKIWEEQNHICIYTGKTISIDSFLGGNPKFDIEHTIPRSISQDNSLMNKTLCDKDFNRSVKGKKMPVELSNYNEILPRIAHWKKQAEELTRQIETISRSIKSAATKVAKDKNIRKRHYLTLKRDYIQGKYDRFTWGEPKVGFKNSQIPDTGIITKYAQAYLKSYFKRVESVKGGAVAEFRKLWGIQESFIDENGFKHFKEKDRSKHTHHTIDAITIACMPKDKYDLLAHAWRLEDEQNKKAAKALIEQAKPWKTFKEDIEKIEAEILVSHFTPDNVKKQAKKILRVRGKKQYVAEIERNANGKAIPKKDASGKIIYKLNERGNKIPILQQGDTIRGSLHQDSIYGAIKNPLNTNEIRYVIRKDLESLKANDIENIVDENVKAKVKEAVANKILLISSNPQQKNKFAEGKNVWMNEEKKIPINKVRIYANSVKNPIEIKKHSTLSKSKHEHKQTVYGQNDENYAMALYELDGKREFELINNFNLAKLLKQGQGYYPLHKEKEIKGKKVLIPIEKRNNRDVVLKRGQQVVFYDKTVENSKDISEIVDFRGRVYLIEGLTIQRQKDKKTGKVNEYGIIQLRYFKEARKSEEISKDSFKPDGEFKINENKPTRKMNHNQFTAFVEGIDFKVLPSGKFQKI

SEQ ID NO: 965 - protein, 1509 aa, Chlamydia trachomatis
MITLGLDIGVSSLGTAIVDTQNNQILHTGVYVFPAGKEAFGTNKEKPKNETRRVARQGRRQNYRRRLRRSQLLKFLYQLSELNSPEGDRYVPLTFEEIDAWLSWDKEGKTAARQFPDSDAFRAWMAMNPYEIRSRAVEGSITRAEFGRLLYHIIQRRGFQSSRKMKTDEGAMAKGSGAIIGYTQTKSELGEQTLGQYLYQISAKEGEPFSQREEKPRGRYTLRSMYVEEMERIWGQQSKRLGLEGLEIEGTPVKELLLGQISHDPESGELLYKSNDSVLFYQRPLRSQKHLINKCSLESRKMYDPLKQRHYIQGPRAAAVSHPTSEFHRALQVLSNVRVEGRTLYDMGLFQTSLDFLCSKNSKTIKVADLKRHLSLVSKLNYDDDQTLPGCPTIASITDLFEKDELSYHYGETDTIYIDIWQKLLFYDDERLLEKNIADYAKGKGLKLKADFAKRLEGINLVDDYGSISIHAMDNIIPFLLQGLSHTEAIFLGGVKNAFGPRYYYFEKEEQMWQELLQIINEPASKGEKIDRLIEYLSNPDEQTGLDEKRLRMKLYHPTQSVQKIEIQNRLGMVDNLRNPIVEQALWAVRRQVNALIDQMIEQTGNPNFRFDRITIELSRDLKSSLDRRLKIRQEQEANRAENEEAVIELRARGVRVTRDNILKYRLHKELQQQDGIARCPYTGKNINPSHLYDGNNFFQIEHIIPRSISLDDSFGNKTLCESNFNREKGNKTPYEFYSVNSSKALWGAEDWDEITHRVRRVLPARKASRFLSKRSAQEQLEELPSKMLNDTAYMSVKAREYLTSICGDVRSVTGHITADLRRMWQLNKILGETYECAPGAVSEELIARGDTDVYALLDSESQVVNRVAPKLHLIPNPTADEIRIPVVVKGTKLYRDGKEYPKPAHLDLNGVTGEALIAYHAVGGTPYCQPLFNPKPSTKDMLVVPATINSKNQLTSDYIEALRKVKKSQYPTDPGKYWVTLQLKGEPIWELPSNKKRATDNAVRVSGRLNGNAFWSPLFETEVDSGVVNMEEHRNRTAYLNLDYDTAEFTKMLRPAPEVGVGELLLTGVANHGLLLLDQCDGKTIDVQHLNLQEQTKYYVSLRYGETLSPEERVTIYPLYAKTPTPRGGEVLLEGKLFLLDKSQGLYALEPVKNRDDHRHHAVDALVIALAKQNYVTELSTYNRQDDSYRQGEALKPRFDLPWKGFREEAEQSINDILVVHKKNRVAPLSKVTRKITKKGKVYTSEGYAVRGALHKATIYGQRKAPGETEVGYHSRKSIAEVTKMSQLNKVVDAAIRKEMLRILKEEFGLDISNPKLVFPKNAFIDEEGKTKVYLPNRNGGESVPVKKVRLCDRFNNAVRLKETNQYVDPQNNHHVLIYQDQDGNLQESVVTMWDVVDRRNRGEEIFQLPPDGKRILFKLMRDRMYLIGITREEILLHLSDTAYLSKYLYRVQKLSSMYYVFRKATASTTNYDREMIRVQSLPFFEPDKDNIHSVEITLTGQVKLKDD

SEQ ID NO: 966 - protein, 1361 aa, Streptococcus varani
MKKPYSIGLDIGTNSVGWSVVTDDYKVPAKKMKVLGNTDKEYIKKNLIGALLFDSGETAEATRMKRTARRRYTRRRNRILYLQDIFSPELNQVDESFLHRLDDSFLVAEDKRGERHVIFGNIADEVKYHKEFPTIYHLRKHLADSSEKADLRLVYLALAHIIKYRGHFLIDEPIDIRNMNSQNLFKEFLLAFDGIQVDCYLASKHTDISGIITAKISKSRKVEAVLEQFPDQKKNSFFGNMVSLVFGLMPNFKSNFELDEDAKLQFSRDSYDEDLENLLGIIGDEYADVFVAAKKVYDSILLSGILTTNNHSTKAPLSASMIDRYDEHNSDKKLLRDFIRTNIGKEVFKEVFYDTSKNGYAGYIDGKTNQEDFYKYLKNLLQKVDGGDYFIEKIEREDFLRKQRTFDNGSIPHQVHLDEMKAILRRQGEFYPFLKENAEKIQQILTFKIPYYVGPLARGNSRFAWASYNSNEKMTPWNFDNVIDKTSSAQAFIERMTNNDLYLPDQKVLPKHSLLYQKFAVYNELTKIKYVTETGEARLFDVFLKKEIFDGLFKKERKVTKKKILNFLDKNFDEFRITDIQGLDNETGNFNASYGTYHDLLKIIGDKEFMDSSDNVDVLEDIVLSLTLFEDREMIKQRLLKYEDIFSKKVIANLTRRHYTGWGRLSAKLINGIKDKHSRKTILDYLIDDGHSNRNFMQLINDDNLSFKDEIANSQVIGDGDDLHQVVQELAGSPAIKKGILQSLKIVDELVKVMGYNPEQIVVEMARENQTTARGRNNSQQRLGSLTKAIQDFGSDILKRYPVENNQLQNDQLYLYYLQNGKDMYTGDTLDIHNLSQYDIDHIIPQSFIKDNSLDNRVLTNSKSNRGKSDNVPSNEVVKRMKGFWLKQLDAKLISQRKFDNLTKAERGGLSAEDKAGFIKRQLVETRQITKHVARILDERFNRDFDKNDKRIRNVKIVTLKSNLVSNFRKEFGFYKVREINNFHHAHDAYLNAVVAKALLIRYPKLEPEFVYGEYPKYNSYRERKSATEKMFFYSNIMNMFKTTIKLADGRVVEKPVIEANEETGEIAWDKTKHFANVKKVLSYPQVSIVKKVEEQTGGFSKESILPKGGSDKLIARKTKNNYLSTQKYGGFDSPTVAYSIMFVADIEKGKSKRLKTVKEMIGITIMERSRFESNSVTFLEEKGYRNIRENTIIKFPKYSLFELENGRRRLLASAIELQKGNEMFLPQQFVNLLYHAQHANKEDSVIYLEKHRHELSELFHHIIGVSEKTILKPKVEMTLNEAFEKHFEFDEVSELAQSFISLLKFTAFGAPGGFKFLDADIKQSNLRYQTVTEVLSSTLIHQSVTGLYETRIDLSKLGGE

SEQ ID NO: 967 - protein, 1055 aa, Staphylococcus haemolyticus
MKTDYILGLDIGITSVGYGIINYNDKSIIDAGVRLFPEANVENNEGRRSKRGARRLKRRRIHRLERVKQLLLDYKLLDSIDVIPQSTNPYEIRVRGLREKLTKDELVIALLHLAKRRGIHNIDVIDQEEDASNELSTKEQLSKNNLLLRDKSICEVLLERYNEGKVRGEKNRFKTSDIVNEIRQILETQKEVHHLDDSFIDKYIELVETRREYYEGPGEGSPYGWGADLKKWYEHLMGRCTYFPEELRSVKYAYSADLFNALNDLNNLVIQRDGLNKLEYHEKYHIIENVFKQKKKPTLKQISNEIGVNPEDIKGYRITKSGKENFTEFKLYHDLKKILKDQSILENIQLLDQIAEIITIYQDKESIKKELEQLTEPINEIDKESISDLAGYNGTHRLSLKCINLVLEELWHTSRNQMEIFAYLNIKPRKIDLQKANKIPKDMIDEFILSPVVKRTFGQAINVINKVIEKYGVPKDIIIELARENNTKDKQKFINELQKKNEKTRQRINEIIGKTGNQNAKRLVEKIRLHDEQEGKCLYSLESIPLEDLLNNPNHYEVDHIIPRSVSFDNSYQNKVLVKQTENSKKGNRTPYQYLNSGEAKLSYNQFKQHVLNLSKSKDRISKKKKEYLLEERDINKFEVQKEFINRNLVDTRYATRELTNYLKAYFSANDMDVKVKTINGSFTNHLRKVWDFNKERNHGYKHHAEDALIIANADFLFKENKKLKAANKVLEQPERKEIETKIEVNSDENYQDLFVIPQQVKEIKEFRDFKYSHRVDKKPNRQLINDTLYSTRVKDDDLYIISPIKNIYSKDNTDLKKHFNKNPEKFLMYQKDPKTFEKLEVIMKQYANEKNPLAKYHEETGEYLTKYSKTNNGPIVKSIKMFGKKVGNHLDVTNQYNNSRNKLVKLSFKSYRFDVYLTDKGYKFVSITYLDVLKKENYYYISEAKYDKLKLNKGIDDKAKFIGSFYYNDLIELDGEVYTVIGVNNDKNNVIELNLPEIRYKEYCEINNIKGSGRLRITIGKKVNSIRKLSTDVLGNRYYQSFAKKPQLVFKKGI

SEQ ID NO: 968 - protein, 1175 aa, Mycoplasma arginini
MNKKDVTIGFDLGIASVGWSIIDNKTNDILKLGSRLFQEREKAEDRRNFRNIRRRIRRRKYKKEKFINLVLKNKDIFGFSSEKEIYDSFEKNSENWPNILDLKIKALNQKIEKSEIVWLLHDYLKNRGYFYATNEVNINETKQDNCFPSELLLDFYKENNFFKSNSSISRENGGYTFSNKDWTKEIEHMLTVQEINTKFSEKYIFIFNYVRPFSKGPGSLNSASEYGIYNYDENGRIVKKYTNIWDKTIGKCSLFEDEKVISTSYPSYEIFNLLNDLANIRPVNEKEQWALSPKNKEELLNNLFHNILNKTKAQSITIKQIEKIYIKEKGLEDISDQLKGKNLLKQFGLNNNLTTLNSINKLLKIIKNFSSKYNEINTKNIWVLLPILDDICSIIEVPRKLDEYDEYYKLFSEHEIIDKLFISGEAEEDFIKQIISIKELNFNKKGSLSKKAIDLYLSKMRDLKNNSEFIKWNDKELKQIVIERKEKSRINPNNKYIDPFIFSDDILSPAAKQTFEQAIKVLNRIIKLYSNEYNIKSIVVEMPKTKNDKETIEKYNQDNVKKDFEGIIKLLPINITVDELLEKKTNSLLEKLKLYVQQDGIDLYSMQKMDIWEVINYPGNFEIDHIIPYSLSYDNSVGNKVLTTKANNQAKGQKTAMEYLGSLNLFNIDEYKTKCAQLFLNKDTFTKNKNNIVITEKNAENKYKNLTWDNFNESNKNEFINRNLNDTRYAVKLFVETLRKHFDNKETKIIGINGHVTSYFRNISFLPKNRNFNYHHAIDASIIALVINNNKYIARLLTIADNEWKILNDHQMIQKFTGEVKEITDLDFKKNIMAHFVSKIIKEKINLIVENNYELVQFSRKIKIMNNAPLFDQTLYGLKQTETNDQDKVYKVVKINLIKEKNKKLQKYFENPIVEEGRKKYSVLMAQSHLKEFNNLKEIFKKYNLKNTGSAFIDYMNDLNSNFPELVTKKMIDNAIATNRVIYLDLNNMKTRYYKDLRIVEKSLIPINFKYNNGKSFKDTNTTLFSLVYKNENNNYNSIPINFLTYKFGIKNNNLLDENIYNKNNLEKYKENLKISFSEKPLFAIKQGTILRRKNLSENWFENLYYVSGISKEEDKDTRYTLTNLIKTKPLNKENKEEVKTIISKLTNPLLKEFDIIYLDELGNEYKANISNLDC

SEQ ID NO: 969 - protein, 1114 aa, Chlamydia trachomatis
MQFHFYMVYVTIKDMNCKDASQQLRYRVGIDVGTHSIGFCAVEVDESHMPIQLLNSMVHMHDSGIDPDENDKAMTRLAKSGVARRTRRLIRRRKKRLQELDAFIEECGWPLVDLATITDARSPWRIRARLATEHIDDEAEQNKLLSIALRHMARHRGWRSPYARISSLHIQADPSEQLKALAERVSEKTGISLTADQTPAQLISVYLDVFETGKLRGPQGILGGKLMQSDNANELRRIATVQGLDNDLLKKIIGFVFAAESPKGSAAKRVGKDILPGAHGPRAEKAHPAFQQFRIVSIVQNLRIKEGTGCRALTPEETEIVVDFLNQAGLTKAPTWEEVADNLEIPRSHLRGTATEGFDGIAPSTRPPFDVTSQKILNGKLKKLSTWWKDADYHHRCAMVNALSNVGSDDEGSLADDDVREFLSNFTDEELEALDKVELPGGRAAYSVDSLEKLTNTMLSEGCDLHSARKLAFEVDDSWTPPAEPIGQPVGNPAVDRVLKQVARWISAATNQWGTPESVNIEHVRDALGSEKASREYQRSLQTRRTRNEKLFAEMRERLDIGGKPRRSELTRYLALQRQNCQCLYCGMPITYTDAEMDHIVPRKGAASTNTRENLAAVCRACNHQKSNLPFAVWAEKTERPGVSVKEAYKRVSDMRIEPGMNGREMNEFRKAIRLRLTTKHADAEIDGRSLESVAWMANELRHRIEGFYRSAENDVTVRVFRGAVTAEGRRASGFESRVNLIGGKGKTRLDRRHHAMDALTIALMEPEIAQTIALRMNMRDSQRVLGEQETWKSFTGGSDTTRKNWEHWCEEMVRASELFNVFLAEDRIPICQNKRLRLGSSAVHKAIVQPFKASDKRIVSDAMPVELIDRASTPALWTALTRDPDFDPKEGLPANPSRTIRLHDKRLGPKETVDFFPTAAACLAIRGGYCEIGAGIHHARIFRISGKKTTYAMLRVYQCDLVRFQKEDLLTVELPANTISVRTAVPKLREALANGTAEQIGWLVVGDELKIDPSGFTTGQIGTFNETYPQATRWEVTGFPDKAKLGLKPLLIASEGLADDAPDDIVKIVERPGWRPAIDKLLKIGNVFLYRRDTHGKPRVVSHRSLPLSSKLQ

SEQ ID NO: 970 - protein, 1330 aa, Enterococcus massiliensis
MGKEYTIGLDIGTNSVGWAVLQEDLDLVRRKMKVYGNTEKNYLKKNFWGVDLFDEGMTAKDTRLKRTTRRRYFRRRQRISYLQTFFQEEMNRIDPNFFNRLDESFLIEEDKLSERHPIFGTIEEEVAYHKNYATIYHLRKELADAEEKADLRLVYLALAHIIKYRGHFLIEGRLSTENTSTEETFKTFLQKYNQTFNPVDETISIGSIFADKVSRAKKAEGVLALFPDEKRNGTFDQFLKMIVGNQGNFKKTFELEEDAKLQFSKEEYDESLEALLGEIGDEYADVFEAAKNVYNAVELSGILTVTDNSTKAKLSASMIKRYEDHKTDLKLFKEFIRKNLPEKYHEIFNDKNTDGYAGYIDNSKKTSQEKFYKYITNLIEKIDGAEYFLKKIENEDFLRKQRTFDNGIIPHQIHLEELKAILHHQAMYYPFLQEKFSNFVDLLTFRIPYYVGPLANGNSRFSWLSRKSDEPIRPWNLAEVVDLSKSAELFIERMTNFDLYLPSEKVLPKHSMLYEKYTVYNELTKVTYKDEQGKVQNFSSEEKERIFIDLFKQHRKVTKKDLSNFLRNEYNLDDVIIDGIENKFNASFNTYHDFLKLKIDPKVLDDPANEPMFEEIVKILTIFEDRKMLREQLSKFSDRLSEKTIKDLERRHYTGWGRLSAKLINGIHDKQSNKTILDYLINDDAPKKNINRNFMQLINDNRLTFKEEIEKEQLKANSEESLIEIVQNLAGSPAIKKGIFQSLKIVDELVEIMGYAPTNIVVEMARENQTTANGRRNSRPRLKNLEKAIDDLDSEILKKHPVDNKALQKDRLYLYYLQNGKDMYTNEELDIHKLSTYDIDHIIPQSFIVDNSLDNRVLVSSSKNRGKLDDVPSKEVVKKMRAFWESLYRSGLISKKKFDNLVKAESGGLSEDDKAGFIHRQLVETRQITKNVARILHQRFNSEKDEEGNLIRKVRIITLKSALTSQFRKNYGIYKIREINDYHHAHDAYLNGVVATALLKIYPQLEPEFVYGEFHRFNAFKENKATAKKQFYSNLMEFSKSDKVIIDENGEILWNQKKIVTVKKVMNYRQMNIVKKVEIQKGGFSKESILPKGDSDKLISRKKEWDTTKYGGFDSPNVAYSVVIRYEKGKTRKLVKTIVGITIMERAAFEKNEREFLKNKGYQNPQICMKLPKYSLYEFDDGRRRLLASAKEAQKGNQMVLPAHLVTFLYHAKHCNEKPDSLKYVTEHQSGFSEIMAHVKDFAEKYTLVDKNLEKILSLYAKNMDSEVKEIAQSFVDLMQLNAFGAPADFKFFGETIPRKRYTSVNELLEATIINQSITGLYETRRRLGD

SEQ ID NO: 971 - protein, 1697 aa, Dysgonomonas sp.
MKKILGLDLGTNSIGWALVEVDHEKKIVKIIGLGSRILPMDAAEIATFETGGKLPSSAAQRREKRSPRRLNERYLLRRDRLHCVMNLLQSLPEHYQLSIEFENEKGKRSGKFKKGIEEKFAYYKDDNGKYQFLFMDAYQEMENEFRQQHPNLFYVKNNSKQTKIPYDWTLYYLRKKALQKTNNELTKEELAWITLSFNQKRGYEKVIGQDEKEQKDGILLETFTGKVKNVIKIEDKDLYEIVLVEFNNEENELYRYKEESKVQITFKNDLKEIEIISKYDDEGNVDSEKAEYIINEIRESLLVLNVRNTGRRNKENFIFEIELETGWIKEQQSRFTPDWKGTSRDFIIKTKYDKDGNRIPRGQDKGRSISIPKEEDWSLMKLKTETSIHSFNTKYNTTGVAPYIYYNLLQNPNQKVKAGLVTVIEREFYEKELEAIYNSQEKYHPELNNRELYRQAVQLLYPNNKTRRDALINLDFKNLISTDIMFYQRDLKSKKSLIADCDYEKRNYFNKEIGVVCKQPLKAIHAANPLYQEFRLWQFIKSLKIIKCEDVIGDEILINQDVSRELLTLDIKEKIFEFLNDRKEITQKQLLKKLSELHNEKTISSNNYKWNYPEYDDEDKKNEYKIICNPTRSEFIIRTKKIKNFYWDTFLSPENEYLLWHFFYSVKKKSEFSSGLNSLVEKLLKRAGLPADYKSNLVKSFSTFSGYKNDYGAYSEKTIKKLLPFLRIGKYWKREDVEQILENRPSDILEKVEIVLDKVVTKEEINGEITDFQGLWLSSACYLVYGRHSEVGDVKFWTSPYDIENFIRNEFKQHSLNNPVVEKVLIEMLQVVKDIWMYYGLKAGIDENGKFTYNKLFDRIHIELGREMKKNNKQKQSDDKKNSENRKTNNRIIELLKDLKKENPSIQEKSPFQQEKLKILEQGVLASIEYEKDNVSYELLNSSETISKKEIKELVSEDISKVSKGVFERYKLWLDQRYQSPYTGKFIKLSDLFDRTKYEIEHIFPQERLTLNSLENKVICETEVNKDKKANTGYEYILGANNKLIRCAAHGYKEIPILSVDDYKELVNRNFIGKKRDILLCKDIPDEFTNSQKVNMQYISKMAVKLLSNIVREKDEDTYRSKNVLATNGTITSTLKKHWQLNEIWSDLMSPRYKRLNKLTESTLFGDIRIMNGHEVFVNNNQIPQQINKNFDPKRIDHRHHAIDALIIALTTENHVNYLNNISSQDKGEDKLKTRKIIKYQLTDTKRGDNSTKEWYFLPPAQLKTKEGIINYNYEYKDISGNVFKDIAKTALEDTIASFKQKNRIIRQRWNKYSTLENGSIVIKEQEGLSGKENFSIRQSLHKSTFYGKVKLAYKTSNIKLEEAIFEDYDIVDNLLSKKIEDMKKQLSISEIVACLSVNYPTVRVYDKFVATRYGCKLESLATISSDKEVKKMIESITDTGIQEILQNHLKNYDSDPQTAFSYDGIRALNEAIVKPKHGLTKKGKPHKPIYKVRMADVMGAKFSVSEDGQKSTKYVVTDAGSNAFCGVYEIKKGERKFYIPTLKELLNNLKNGENPCPGSHPDFPEYNWIFNLCANDLVYLPTQDEIDNDNKTPVDIDSLDKSRIYKFTDGSGTTLNFVPVNFASLLYGFPKNVARKNAENLKKEHSLEYTDVLLQNELGLGSPQSKNQNSIDRIQIKKYCIKLDVDRLGNIKPLLP

SEQ ID NO: 972 - protein, 1381 aa, Enterococcus thailandicus
MPKFVYGLSLILTRYVVLNATNKYILSHIREYTTEIFFLFFTRIVTEENPGGVKMKKNYTIGLDIGTASVGWAVLTEDYELIKRKMKISGNTQKKAVKKNFWGVRLFEQGETAEGRRLKRTTRRRIARRRQRIQYLRTIFDEGMNQVDANFFARLDESFSIIDEKENERHPIFGNVAEEAAYHEQFPTIYHLREHLANSSEQADLRLVYLALAHIIKFRGHFLIEGELNTENSSVSGTFEQFIKVYNETFNVEKALDLTVDLDGIAEQKISRMKRAELILSLFPEEKSTGDFAQFIKMIVGNQGNVKKTFSLNEDAKIQFSKEEYEENLETLLAEIGEDFRSVFDAAKSVYDAISLANILKVTDATTRAKLSSSMVVRFTDHKEDLKTLKRFVRENLPDEYDDLFKNKKVAGYAGYIDGNETQEAFYKYLKKTLAKATGAEGFLAKMEQEDFLRKQRTFDNGVIPYQLHLEELKAIIKNQKSYYSFLDEEKISQLMTFRIPYYVGPLAKEKGQFAWLTRKEMGKITPWNLNEKVDIEKSATDFVERMTNNDSYLPMEKVLPKHSLLYETFTVYNELTKVRYIDDNGRAQNFSSKEKRQIINELFKQQRKVKKEMLEAFLKNEYGIENPKVEGIEKSFNACLGTYHDLIKLGIRPELFEQPEHEQQFEQIVKILTVFEDRKMRREQLEKFSNILTEEEQKQLERKHYKGWGRLSAKLIHGIVDQKTQKTILDYLIDDDDLPKNRNRNFMQLINDENLSFKEEIEKIAFDNDKSTEEIVQELAGSPAIKKGILQSLKIVEEIIDIMGELPTNIVVEMARENQTTAQGNRASKARMKYLEESIKKLGSSILEDEPISKDANLLRNDRLFLYYLQNGRDMYTGNELDINNLSSYDIDHIIPQSFVKDDSIDNRVLTTSSMNRGKSNTVPAESVVKKMRPTWERLLASGLISKKKFSYLTKATNGGLTEEDKAHFIQRQLVETRQITKNVAQILHQKYNNEQSSEKPVRVITLKSALASQFRKDFSLYKIRELNDYHHAQDAYLNGVIAQALLKVYPKLEPEFVYGEYQKVSIRALNKATAKKEFYSNIMNFFTSDEMVANEETGEVLWNRQRDIKTIKKVMNYHQMNIVKKVEIQTGAFTKESILPKGPSKKLIARKNNWAPVNYGGVDSPTVAYSVIITHEKGKAAKVVQQLVGIKILERQAFEQDEVAFLEEKGFIHPKVQLKLPKYSLYQFADGRRRLLASAEESQKGNQMVLPVHLIELLYHAKHVSDSSGKSLEYLNEHRHEFAELLEAILQFTEQYIDAGKNQKKVRDLYEKNQDADMRELASSFIQLLQLNKQGAPADFKFFGETIPRRRYKNTAEIVDATFINQSITGLYETQRRLV

SEQ ID NO: 973 - protein, 1072 aa, Shimia marina
MRLGLDIGTNSVGWWLYKTDGEAASARIVEVIDGGVRIFSDGRDPKSKTSLAVDRRVARAARRRRDRYLRRRASLMKLLARTGLMPADPVEAKKLERLDPYELRSTGLDDALPLTHFGRALFHLNQRRGFKSNRKTDRGDNENGKIREATARLDLEMMTSGARSYGEFLHMRRQRASDPRHVPSVRTRLSVAARGGPDAKAEAGYDFYPDRHHLEEEFHALWAAQATHHQALTDDLRDLVFEKIFYQRPLKEPKIGLCLFTAEERIAKAHPLTQRRVLFETINQLRVTADGRSTRPLTLEERDTLVHALDNKKPTKSMTSMNMTLKALAKLLKLRDGERFTLETGVRENISCDPVRACMAHPARFGPQWSSLDWEAQWDVISRVRQVQSEGEFIELTDWLIQGHGLDADHAKAVGNAPLPEGYARLGFSATERILDQLKAEVCTYSDAVAKCGWHHSDQRTGACLEVLPYYGEVLDRHVIPGTYDATDDEITRYGRITNPTVHIGLNQLRRLVNKIIEVHGKPDQIVVELARELKQSEPQKKDAMKRLRNTTADAIRRSEQLEQLGQPNTGHNRMLLRLWEDLGPAIGPRCCPYTGKTISVTMVFDGSCDVDHILPFSRTLDDSFANRTLCLKEANREKSDRTPWEAWGGTDQWDDIAANLKNLPEKKRKRFGPDAMEWFEGENDFLDRALVDTQYLAKISRMYLDTLFTKGGHVWVVPGRMTEMLRRHWGLNALLNDKDRGAVKAKNRTDHRHHAIDAAVVAATDYRLMQKISRAAGQGENAGQSAELIARDTDAPWEHFRADIASQLEKIIVSHRADHGRIDVEGRKTGRDSTAGRLHNDTAYGVIDDLTVASRTPLMSLKPSDIAITERGKNIRDPQLQNALYVATKGKEGKMFEQALVDFASKEGPYQGIRRVRLVETLQKAARVEIGKTESGQPLKAYKGDSNHCYELWKLPDGKIVPQVVTTYEAHAGSAPRPHPAAKRILRVFKKDMVKLTKDGEEIVGYVQSMHIKNGLFVAQHLEANADARNRDKTDPFKFLQMGAGTLVKTGLRRVLVDEIGRLRDPGPPKL

SEQ ID NO: 974 - protein, 1375 aa, Lagierella massiliensis
MKNFKDYYVGLDIGTSSVGWAVTDDSYNVLKFNSKKMWGVRVFDEAKTAESRRLQRGAKRRLDRRKERINLLQDFFAEEVSKVDANFFLRLDNSDLYKEDKDEKLKSKYTLFNDKDFKDKDYHAKYPTIHHLIMDLIEDDSKKDIRLVYLACHYLIKNRGHFIFEGQKFDIKESFDTSIDNLKIHLKDEYFIDLEFDNSDLIKVITDDTLNKSEKKEKLKDIVGDTKFLKAISAIMIGSSQKLNGLFGYDEELKNETIDFSKSDFDEKHGDFEALLGEKIALLDILKEIYDSSILENLLKEADKSDDGNRYISQAFIKKYNKHGSDLRKLKSIIKKYLPSNYDEIFREENIQDNYVAYTKSNITNNERKKATKFTSQENFNTFIKKKLEIIEKDIKEEDNEDFIILNEMLNDIKEKTFMPKLKSSDNSIIPYQLKLIELERILDNQSKYYGFLNSSDKYGTVAEKIASIMKFRIPYYVGPLNPDSKYAWIKRSGGKITPWNFEDVVDLDSSREGFIDRLIGRCTYLKEEKVLPKSSLLYSEFMVLNELNNLKLNGVIISEDMKKSILENLFKTKKKVTLKSVSNLLKKDFNITGEVLLSGIDEDFKQNLNSYIDFKNIIGEKVDRDDYRKNIEEIIKLIILYGDDKNYLQKKIKSAYGEYFTDAEIKKIISLKYRDWGRLSKKLLVGIEGVNKDTGETGNIIHFMREYNLNLMELMSSKFTFVEEIQKSKPIDNRKLCYEMVDELYLSPSVKRMLWQSLRIVDEITGIMGNNPKKIFIEMARGEEEKKDRKNSRKKNILEFYKKGKADFIKEIGEDRYNYLVSEIEREEEPKFRWDNLYLYYTQLGRCMYSLEPIELSDLASKNIYDQDHIYPKSKIYDDSIENRVLVKKNLNHEKGNMYPIPEKVLNKNCYSYWKMLHDKKLIGDKKYARLIRNTAFNDDELLQFIERQIVETRQATKETANLLKTICKNSEIVYSKASNVSRFRQEFDILKCRTVNDLHHMHDAYLNIVVGNVYNTKFTKNPRNFIKDKEENKSYNLENMFKYDVKRGNYIAWIADNHKGSIKDATIKRIKKEIQGTNYRFTRMSYIGKGELYNQNLKRKGNGQFPQKENSKKFDINKYGGYNKAGSAYFALVESDGKKEREKTLETIPIIVNNKVKNGEKDAIYNYLTKNLELKNPEILVNKIKINALIKLDGFFYNITGKTNDYYLIAPAVQLILDKKDEKTIRKLEKFLSRKLKDKNAKVLKSDGIESKDILSLYDNLSDKLNNSIFKYRIKNLSEVITSGRDLFINLKKEDQILVLKEMLLLFQNINNGVDLSLIGNVNKKTKKPIKASGKTLLSKKINYNEFKLINQSITGLFENELDLIKIWPGELL

SEQ ID NO: 975 - protein, 1031 aa, Acidovorax sp.
MPAIYRLALDLGSTSLGWAVLRLEPAALEPIAIIKAGVRIFSDGRNPKDGASLAVTRRAARAMRRRRDRLLKRKARMQDKLVKHGFFPSDMDERKALERLDPYALRAKGLREALTPGEFARALFHINQRRGFKSNRKTDKKDNDSGALKKAISHLRQQMEAGGHRTVGDHLWSRLQQGLGVRARYRETPFTNDEGKKRIDKSYDLYIDRAMIEQEFDALWAAQAAFNPALFHEVARADLKDTLLHQRRLRPVKPGRCTLLPEEERAPLALPSTQRFRIYQEVNHLRLLGEDLREVALTLAQRDAVANALESKARLTFEQIRKLLKLSGSVQFNLEDAKRTELKGNATSAALARKELFGAAWGGFGEALQDEIVWQLVTEEGEGALIAWLQAHTGVDEARAQAIADASLPEGYGSLSRKALARIVPALRAGVVTYDKAVQAAGFDHHSQLGFEYDAGEVEDWVHPDTGEIRPVFKQLPYYGKPLQRHVAFGSGKPEDPDERRYGKIANPTVHIGLNQVRTVVNALIRRYGRPTEVVIELARDLKQSREQKVEAQRKQAENQRRNARIRKSIAEVLGIGEEQVRGADIQKWICWEELSFDVAERRCPYSGVQISARMLLSDEVEVEHILPFSKTLDDSLNNRTVAMRQANRIKRNRTPWTARDDFEAQGWSYEGILQRAERMPLRKRYRFAPDGYERWLGDDKDFLARALNDTRYLSRVAAEYLRLVCPGSGTRVIPGQMTARLRGKFGLNGVLGPDGEKNRNDHRHHAVDACVIGVTDQGLMQRFANASAQAREDGLTRLVDDMPRPWPTYRAHVERAVRHIWVSHRPDHGFEGAMMEETSYGIGKDGSIKQRRKADGSPGREITNLIRIHEATQPQRHGAGPDGQPLPYKGYVGGSNYCIEITRNDKGKWEGEVISTFRAYGIVRTSGLGQLRHPRVGQNGRELVMRLVIGDSVRLEIDGIERTMRIVKISGSNGQIFMAPIHEANVDARNSDKQDAFAYTSKYAGSLQKTKARFVTISPIGEVRDLGFKG

SEQ ID NO: 976 - protein, 886 aa, Campylobacter coli
MKILGFDIGINSIGWAFVEDNQLQDCGVRLFTKAEDPKTKESLALPRRNARSNRRRLGRRRSRLIALKHIISKELKLNYQDYIANDGELPKAYEGRLVSPYELRYKALNEKIEPKDLARVILHIAKHRGYMNKNEKKSSDNEKGKILSALKTNALKLEKYQSVGEYFYKEFFQKYKENTKDFINIRNKEGSYENCVLASDLEKELKLILEKQKEWGYSYNDNFIKEILKVAFFQRPLKDFSYLVGACTFFEDEKRACKNSYSAWEFVALTKIINELKSLEKESGELVSSQIINEILNHILDKGSITYKKFREYIKLHESMKFKSLKYDKDNAESVKLIEFRKLVEFKKALGEHSLTREELDQIATYITLIKDNEKLKITLEKYSLNNEQIKNLIEIDFNDHINLSFKALNLILPLMKEGKRYDEACKLLNLKTKSNNQKFDFLPAFCDSIFAQELTNPIVNRAISEYRKVLNALLKKYGKMHKIHIELARDIGLSKKLRTKIEKEQKENYENNIWALNECENFGLKANAKNILKLKLWKEQKEFCIYSGKKISIEHLRDEKALEVDHIYPYSRSFDDSFLNKVLVFTKENQEKLNKTPFEAFGANEERWSKIQALAQNLPYKKKNKILDEAFKGKQQQDFISRNLNDTRYISTLIVKYTKEYLDFLPLDEKEDINLKSGEKGSKIHVQTINGMLTSVLRHTWGFAQKDRNNHLHHALDATIVAYSTNAIIKAFSDFKKEQELLKAKLYAKELTNDSYKHQAKFFEPFEGFREQILNQINKLFVSKPPRKRARGALHKETFYSKDEMIKKYNSQEGVEIALNCGKIRKIGTKYVENDTMVRIDIFKKQNKFYAIPIYTMDFALGVLPNKIVIIGKDKKGNPKQWQEK

SEQ ID NO: 977 - protein, 1363 aa, Lactobacillus rhamnosus
MTKLNQPYGIGLDIGSNSIGFAVVDANSHLLRLKGETAIGARLFREGQSAADRRGSRTTRRRLSRTRWRLSFLRDFFAPHITKIDPDFFLRQKYSEISPKDKDRFKYEKRLFNDRTDAEFYEDYPSMYHLRLHLMTHTHKADPREIFLAIHHILKSRGHFLTPGAAKDFNTDKVDLEDIFPALTEAYAQVYPDLELTFDLAKADDFKAKLLDEQATPSDTQKALVNLLLSSDGEKEIVKKRKQVLTEFAKAITGLKTKFNLALGTEVDEADASNWQFSMGQLDDKWSNIETSMTDQGTEIFEQIQELYRARLLNGIVPAGMSLSQAKVADYGQHKEDLELFKTYLKKLNDHELAKTIRGLYDRYINGDDAKPFLREDFVKALTKEVTAHPNEVSEQLLNRMGQANFMLKQRTKANGAIPIQLQQRELDQIIANQSKYYDWLAAPNPVEAHRWKMPYQLDELLNFHIPYYVGPLITPKQQAESGENVFAWMVRKDPSGNITPYNFDEKVDREASANTFIQRMKTTDTYLIGEDVLPKQSLLYQKYEVLNELNNVRINNECLGTDQKQRLIREVFERHSSVTIKQVADNLVAHGDFARRPEIRGLADEKRFLSSLSTYHQLKEILHEAIDDPTKLLDIENIITWSTVFEDHTIFETKLAEIEWLDPKKINELSGIRYRGWGQFSRKLLDGLKLGNGHTVIQELMLSNHNLMQILADETLKETMTELNQDKLKTDDIEDVINDAYTSPSNKKALRQVLRVVEDIKHAANGQDPSWLFIETADGTGTAGKRTQSRQKQIQTVYANAAQELIDSAVRGELEDKIADKASFTDRLVLYFMQGGRDIYTGAPLNIDQLSHYDIDHILPQSLIKDDSLDNRVLVNATINREKNNVFASTLFAGKMKATWRKWHEAGLISGRKLRNLMLRPDEIDKFAKGFVARQLVETRQIIKLTEQIAAAQYPNTKIIAVKAGLSHQLREELDFPKNRDVNHYHHAFDAFLAARIGTYLLKRYPKLAPFFTYGEFAKVDVKKFREFNFIGALTHAKKNIIAKDTGEIVWDKERDIRELDRIYNFKRMLITHEVYFETADLFKQTIYAAKDSKERGGSKQLIPKKQGYPTQVYGGYTQESGSYNALVRVAEADTTAYQVIKISAQNASKIASANLKSREKGKQLLNEIVVKQLAKRRKNWKPSANSFKIVIPRFGMGTLFQNAKYGLFMVNSDTYYRNYQELWLSRENQKLLKKLFSIKYEKTQMNHDALQVYKAIIDQVEKFFKLYDINQFRAKLSDAIERFEKLPINTDGNKIGKTETLRQILIGLQANGTRSNVKNLGIKTDLGLLQVGSGIKLDKDTQIVYQSPSGLFKRRIPLADL

SEQ ID NO: 978 - protein, 1105 aa, Clostridium sp.
MGIRIGLDIGIASVGWAVVDDDYNIIESGANIFNEAKAASNVDRRTFRQTKRLLRRQKTRLRDFDILWINAGLDIPKEKVNKQLQFRVQGMTMELSENELYAALKNMLKHRGISYLEDALDEEQSGKSTYEKGLQVNQKALKCDKMPCEIQYERLMKYGSYRGHIEVKDESGEEMILSNIFTLDAYCKEAKKILECQKQYHSFITEAFEDDYLALLRRKRKYYEGPGNEQSRTDYGKYTTKLNPETGEYVTEENIFEKLIGKCSVYPKEMRASAASYTAQIYNMLNDLNNLTINGRKLEYEEKKSIVEEVQKASSVNMLKIIKKVINEDITTIEGARKDKNDKEIFHKMETYNKMRHYFEKNGLEFKKISTDDLDEIGNILTLNTEKEAILEAFNKSQLELSQEEKEAFIEIRKKNGSLFNKWHSFSLKIMKELIPELYLQSKNQMQLLTDMGVFKKKTEIFQNYDKIPTDVIIEDIYNPVVKRSIRITVKIVNALIKKYGYPREVVIEMPRDRNSDEEKKRIQDEQKKNDTELKKIIEKVESEYGIKITDTHFRNHKNLRMKLRLWHEQDGRCLYSGKVIDISELLNDCSKFEIDHVIPKSISFDDSRSNKVLVYSTENQKKTNQTPYQYLEGNGKEWSFDEYMNQVIELKDRKLISKAKMNKLLFREDITKIEVLKGFIARNINDTRYASRVVLNSFQKYFESKQSDTKVKVIRGSFTHQMRKKLQLSKNRDESYAHHAVDAMLICYSQMGYEAYRQLQEDLIDPDSEKIRDLGLWKETITEAKYDEVLYTAKWLENRGKIQEAEKKVKFWHKVDSKANRALCNQTIRGTRVIDGSIQKINKINIYSVDGYKTFKNMIQKGKEKDFLMYRNDRRSWDDLMKVYREYSDAKNAFAAYQEETGDYVRKYAKKHNGSKITNLKYCAKELGSCIDISHKYGLEKDSRKVILESLSPYRSDVYYNAGLKQYYIVGIKNSDLCFLKGEYFIDSKRYLQILREEGVLTEQHTLNDLAAIGTEFQFSLYENDYLEYEKNGEIKTERFLSRTKPKQKNYIETKSIDAPKIKNKKQNLVGLAKSKSIKKIRVDILGNRYYASKEKFSLMVDKF

SEQ ID NO: 979 - protein, 1380 aa, Staphylococcus sp.
MGKYNLGLDIGTNSVGWAVVDENNQIVKKGGKALWGVRMFDEAQSAKETRIYRNSRRRIVRRNQRLLLLQKEFYDEIIKVDQTFFQRLKDSFFKKEDKLNKNNYTFFDDDITDREYFKKFPTIYHLRSHLLYNDEKIDIRMLYLALHHIVKYRGHFLDSGEVNESNFSKIKDVLDTFNNKMSEMSLEFEDNEDYFCKIEFDENFENKLKDIMLSQLSKKEKRQELIDLFKVDKKSLVNELLIELLVNKKVKLNSLSITNGKKYEVCEIDFEKEELFEKLEDAKKIITELFDILDEIVNIKKIVDYYYVLKIIGDNEYLSEAMVKKYDKHDKDLRELKSFIKTYCPNKYYECFRKTSNPNLCNYPKYVGINSVNKKIERFAHCKKEEFYKYLKSLFNTIKDENAKLKIDLFQKDMENDDFLNRQNSNHNSSIPMQLNFCELKKILENQSKYYPFLMLKNSDGYSTSDRIIAIFKYKIPYYVGPLNKNSKYSWLVKKSNENITPWNYEKVIDLDASAKEFIQRMQNKCTYLKGENDYCLPKKSILFSEYNCLQYLNRLIINGALIENKLKNEIYENIFLCYKKPTKKSIVEYLKTNYNYDETTLKSNILEVNCDMSSYIQFKEIYGEDFEQNLNIVEDIIKDITIFEDKKILEKRLREIYHLSEDKVQKIKGLNYKGYATLSKHFLNNFYSVNEETGEIYGPIIQIMRDTNYNLQQVIYNDRYNFMKAIDKYNKKNLDTEKKLNVSDFIDEYIYVSPIMKRSLIQSYNIIQELEKILGESISKYYIECARVRSNSKDVINSRYRQLSELYKDCEHQVSDISKNYININKLKKQLEDNKNELRADKLYLYFTQFGKCMYTLKDIDLDDVFLGKYDIDHIYPQSLIKDDSLNNRVLASKEKNGKKDNQFIFNIPEFLPKNAELFYKKLLECKLITKEKYRRLTMKKIDDDELDIFVNRQLVATNQSVKGLVDVLKIYKGVKPTNIVYSKAVNISDFRNNYNLYKSRTANNYHHAHDAYLNVVIGKALDVYYQCNYFQNYKDVIKLKDRNITINPEIILSKNRYVNRNGEKKVIWDLDNTLKLIKNNLYNRFDITETIMTRKSNKMFSKSSISPAKNSKNLIPIKTSDPRCNVLKYGGIKSNSYNFYCIVELYDKKGKKSYILEAIPKTHSDKLEEYIKNSIDEKNVSNFKIINKNIKSNIIIEYKKLRYVITGKSGKYYLIKNFKDRNFSYNAIKTIKYIEKYNYQKKYEIPFEETKEKIILAPKKKDTKEISLTLDNCQALLDEIISLFKKDIYNYDIIYKITSKLEENKQNLTLTNLIKVLTEILILLKTNERGTADLTLIDMSKDTGTLCISKTLKPGMKFISESPTGYYRKIIFEVPNGI

SEQ ID NO: 980 - protein, 1217 aa, Clostridium sp.
MKYNYVLGLDIGISSVGWGLLALDENNNPYKIIDVGSRIFSPGEVEKTGDSKAKERREKRGTRRVIRRREFRLDRVRNLLYEKGYLKGNITSNIVSVKNEELTIIFNDMVNNYYKSKDTNPYKLKVEALDRKLTNDELSIILVHYAKKRGYKSNREESSDNDNGKVKEAIKENTNLMEEKKYRTISEMYIKNEKFKNKIKNGPDDYKLSVTNEMYLEEINKVLDSQIGFGLIDDNFKNEYLEIYNSRRHYSEGPGYYYAKDANGNKVKVRSPYGGDLIKKMTGVCSFDKKARAPKYAFSSELFVSISKLVNLRYKIDDDSYKQLTKEQINELIDEAKNKNKVTYKSLIKILGIKNIKVKDLNLSKSEYIKVIDELKKKLNISKEEKIDIYSLDEENKKIYDDIYNEKLFSKTLIEFKGYNLLKKAITLSYNSGTWNDVKDNIEFLDELALYCTDYKVNNEIQEHIHNSLIIDSRFDDSNFVENLPNFKDHLMLSTDIIRKLIPIMLEGITYDKAMDKIGYNHSNLYKDTIKEDLLVPVYVSKNITNQRVIRSLTQARKVINAIIKKYGSPKIINIETARELAKTQKERRIIEKNQQDKQYENERIKKHLVELELFSDESKITGNDLLKYKLWQEQKEFCGYSMKKIKLEDLFSNNIVQIDHILPYSRTYNDNYLNKTLVYTKYNQDKGNKTPYEWFGKTDKWQEYEAFINSLSISQNKKDNYLLKNLDQDAEREMREQNLNDTKYISRELLSLIKAYLNVDEVNAFPGAITAKLRARWGFNRLTHSYISKTYIMPEDMKKGINKDRDNHLHHAMDALVIASITKSLQQKITLYEKFSRYVDGITKNELGKISTGNINDDLYNYYDEETGEIKELELRQYIKNQVAQNNIYFSKHNVSKLIFPTPYNNFVEEAKLRVYERDLEVLKWNLKNLGTYTSSELNRIHVLIPSVAKNKISGRLHEETYYGLKEVGIGEDKVTYKTLKTPISKVKKKDLDNIPDCKGGSKDIYNALVKWFGNCETGEEALKMHDGKYPVNPNDKEQKEIRKIKVYTKYNATGHVVNNGNVEKGGIYRIDVFKSKNKEDNKLYFTSYDIFEIEQIKAYEKGKNINFSIKLEYGQGKNNKILLYKDVKNEYDLIMSIYKNDLIRIKTKTGNKSTAYVVGFSGGKLEIKSTIGDGYDIIGNNNIFDKSMERYRVTSSTIVKIDKLSISILGEVSGL

SEQ ID NO: 981 - protein, 1104 aa, Bacteroides pectinophilus
MKLILALDIGIASVGWAVLDKKSETVLEAGSNIFPEASAAGNQVRREMRQARRIKRRQRTRLDDFNKLWRKNNLSIPQYKSTEIVNLKVKALREEISLDELYLILYSYLKHRGISYLEDAQDDSLSSSNAYTNGLRENAKALEKHYPCEIQRDRLQTIGKYRGQTQITDDNNEKIDLSNVFTIGAYRKEIKKVLETQKLYHNELTDELCDDYILIFNRKRKYYEGPGNEKSRTDYGRFTTRLDQNGNYIDEENIFEKLIGKCSVYPDELRGAAASYTAQEFNLLNDLNNLTINGRKLEESEKHAIVQRIKTSNTVNMRKIIADCMGETIENFSGARIDKSGKEQFHKFETYNKMRKSLSEIGTDIDEFSRDELDKIGYIMTINTDKEALMEAFNESGLNLDDSVKECLISFRKANSSSFSKWQSFSLKIMNELIPEMYIQPKEQMTLLTEMGVAKGSSGDFAGLNYIPVDVISDEIYNPVVRRSVRISFKILNAVLKKYKVLDTIVIEMPRDRNSDEERKRITDSQKLNEKEMEFIEGKLAQIYNIKLSSSDFSSQKQLSLKLKLWNEQDGICLYSGRTIDPEDIIKNPDLFEIDHIIPRSISFDDSRSNKVLVYRSENQKKGNQTPYFYITHSDGAWTYEQFKANVMNLSKKKEYAISRKKVQNLLYSEDITKRDVLKGFINRNINDTGYASRVVLNTVQNFFKAKEADTKVKVIKGSYTHQMRSNMKLDKNRDESYSHHAVDAMLMGFSEMGYEAYRRLQGEFIDFETGEILKNDMWNEKMSDDVYVDYLYGRKWSAIRNEIVKAEKDVKFWHFIVRKSNQGLCNQTIRGTREYDGKKYKINKFDIRTKEGVKLFKKLAFSEKESDREKLLVYLNDRQTFNNLVKIFEDYKDAPNPFVQYEKETGDVVRKYSKRHNGPRIDKLKYKDGEVGACIDISHKYGLEKDSRKVILESLVPYRMDVYYKESDKMYYLVGVKQSDIKSQNGANVIDEDLYTRILINEKMIEPGQSRDDLEQLGYEFRFSFYKNDIIEYEKEGKVFVERFVSRTMPKVRNYIETKPINKANFEKQNPVGLGKTKSIKKYRTDILGNRYLCEKEKFTKFC

SEQ ID NO: 982 - protein, 1391 aa, Collinsella sp.
MNLRNYPGEYSIGLDMGTGSVGWSVVDEKGNLLHFKKKPTWGSRLFDSVMPASEARVHRGQRRRYERRRWRLDLLQGLFKNEMNKVDPEFFMRLNQSRTIEGDPIFTKSFTKADYYDRFPTIYHLRAYLMESNEPADLRLIYLAMHNIIKHRGNFLREEEKSLSAKHADSKKAVTQFVDALKEWCFSRGYEFGKDPAKSIEKCLSDSKSSRSQLASEIAKALAVSTDAAAADKKLADNLAKAMVGLQCEFKYVFGEFDCESTKLALSDDEKLELLRAACPDDSVELLDALCAVYSAYVLQGLLSYAPGQTISHNMIAKYDLYKTDLKTLRALVREYAPGAYDEFFRGATYHDANPDDSSKDYSYADAEGYTAYNLHKLSYDDFAKAVKKLLGGTDAVTDERYLNMMERFEKQQFLRRLKTSDNGAIYYQLHLEELTAIIKNQGRFYSFLKEYEGKFESLVSFRIPYYVGPLTSVNAAQDSHNHNRFQWSERKPGMEREVITPWNWDTIIDKNKSAENFIMRMTGDCTYLAGEKVLPKQSLLYEEFCVLNELNGVRWSDDGDDWQRFDAAQREGIVRELFHKYRRVTYKMLEDWLVREGDANHPIVKGGQGETGLESKMGSYLFFAKGIFGLGELSPAEYPAIEKMIKWNTLFEDRSILKEKLEDEFGERGNGMLDASQIKAICKKRFTGWGRLSEQFLTGLKVESPAGRAVSIMDVLREGNPCSERRQGETVVMMEALRDEGLGFQKKIDEHNRNYYGQHGKDLGVNELPGSPAIRRSLNQAIRIVEEIASIAGHAPANIFIEVTRGEDAGKKGKRTVKRWDKIGEALKKLKEEGVAVEVMDDFKEQKAINANLDERLSLYLMQNGKCLYSGKAINLEKLLAGSGEYEVDHIIPRAYIKDDSIENKALVLREENQHKTDQLLIDKSIRWKMRETWSQLHDAGLIGDKKYHNLLRSNINENQLRGFIARQLVETSQMVKLAQALLEARFANEETRIVPVKASMSHNLREAADLAKCREANDFHHAHDAFLASRIGLFVQMRHPGIYENPIGYSHVIKKYVQEQSEVFKKTHRMPGSAGFVINSFMSSGFDKDTGEVFKDSWDAEAEVDGIRKALNYRQCYISRMPQQDTGAFWNATVYSPRDPKMGPKLALSTKQGLDPKLYGGFSSQQFAYFFIYEAKKKGKPTFRFSQVPVWLAARIEANPLALEEYARGLAKGEGLEFVSIQRPKIYKKQLIEVNGDKLIITGAKEVRSGAELAFNQDEISAISMCSKLRAAEAGLDGAFSEEVSAIWNRISNAPVQSCGRLLRQLTLPKYQSNFDSSSNEEKAAVVLGLIALLNGNNRIVDLSGVGGSSHAGAMMMSYPKLLDDPKVPFFIIDQSVTGMFERKTRVGL

SEQ ID NO: 983 - protein, 1378 aa, Lactobacillus fermentum
MKEYHIGLDIGTSSIGWAVTDSQFKLMRIKGKTAIGVRLFEEGKTAAERRTFRTTRRRLKRRKWRLHYLDKIFAPHLQEVDENFLRRLKQSNIHPEDPAKNQAFIGKLLFPDLLKKNERGYPTLIKMRDELPVEQRAHYPVTNIYKLREAMINEDRQFDLREVYLAVHHIVKYRGHFLNNASVDKFKVGRIDFDKSFNVLNEAYEELQNGEGSFTIEPSKVEKIGQLLLDTKMRKLDRQKAVAKLLEVKVADKEETKRNKQIATAMSKLVLGYKADFATVAMANGNEWKIDLSSETSEDEIEKFREELSDAQNDILTEITSLFSQIMLNAIVPNGMSISESMMDRYWTHERQLAEVKEYLATQPASARKEFDQVYNKYIGQVPKEKGFDLEKGLKKILSKKENWKEIDELLKAGDFLPKQRTSANGVIPHQMHQQELDRIIEKQAKYYPWLATENPATGERDRHQAKYELDQLVSFRIPYYVGPLVTPEVQKATSGAKFAWAKRKEDGEITPWNLWDKIDRAESAEAFIKRMTVKDTYLLNEDVLPANSLLYQKYNVLNELNNVRVNGRRLSVGIKQDIYTELFKKKKTVKAGDVASLVMAKTRGVNKPSVEGLSDPKKFNSNLATYLDLKSIMGDKVDDNRYQMDLENIIEWRSVFEDGEIFADKLTEVEWLTDEQRSALVKKRYKGWGRLSKKLLTGIVDENGQRIIDLMWNTDQNFMQIVNQPVFKEQIDQLNQKAITNDGMTLRERVESVLDDAYTSPQNKKAIWQVVRVVEDIVKAVGNAPKSISIEFARNEGNKGEITRSRRTQLQKLFEDQAHELVKDTSLTEELEKAPDLSDRYYFYFTQGGKDMYTGDPINFDEISTKYDIDHILPQSFVKDDSLDNRVLVSRAENNKKSDRVPAKLYAAKMKPYWNQLLKQGLITQRKFENLTMDVDQNIKYRSLGFVKRQLVETRQVIKLTANILGSMYQEAGTDIIETRAGLTKQLREEFDLPKVREVNDYHHAVDAYLTTFAGQYLNRRYPKLRSFFVYGEYMKFKHGSDLKLRNFNFFHELMEGDKSQGKVVDQQTGELITTRDEVAKSFDRLLNMKYMLVSKEVHDRSDQLYGATIVTAKESGKLTSPIEIKKNRPVDLYGAYTNGTSAFMTIIKFTGNKPKYKVIGVPTTSAVGLKRVGKPGSESYNQELHRIIKSNPKVKKDFEIVVPHVSYSQLIVDGDCKFTLASDTYQHPATQLVLSKESMEIIADDFKFVKENPATADEQLVRVFDEIVNQMNHYFTIFDQRSNRQKVTKARDKFVSLPTESEYEGAKKTQVGKTEVITNLLMGLHANAAQGDLKVLGLSTFGFFQSSGGLNLSEDAMIVYQSPTGLFERRICLKDI

SEQ ID NO: 984 - protein, 1380 aa, Peptoniphilus sp.
MNTKFNDVDYYVGLDIGTSSVGWAVTNEKYELLKFNNHKMWGSRLFEEASTAQDRREHRSNRRRLERRKYRLDLLEELFVEEINKIDPEFFIRLRESKFHFEDRSLKNTFILFNDKMEGGYNDKVFFSKYPTIYHLRSALINGNKEDVRAVFLAIHNILKNRGHFLLAGNDINISLSLNDTLTDLFEYLKIHLGIEVEFENKLKDIEKIALDKNLSKSDKQKKIVQLLETDYKKQLADVFKLSLGLTANMENIFGKENEQGLEFINAENKIKKIQFDSSYEENIAEFDQFYGEYFEIIDICKKIYDAISLSQILVDGKGLSESKVLSYEKHKEDLKLLKKVLKNIDKAYDNKGEDRLVYKVLKEDKDKGTNYVNYSKLSNNGTATTKEEFYKFLSKNLDLKKFGKLNKEDIETLDYINSEILLGRFLPLQKEKINGVIPYQLQMKELTQILNNASKYLPFLNKIEDGMTVKDKIISLIKFRIPYYVGPLNEYNRIENGNGFAWIEKKKNEKIFPWNFNDVVDIEKSAEKFINNLTNKCTYIKEETVLPKNSIIYSKFMVLNELNNLQYGNKKLDIELKMKMYTDLFLEKKDNRKVTEKRILEYFRINGINDGKEKLTGLNNEIHADMKSYRDMCEIMGENFNINVAENIINWITVFHGEKKILINKIKNVYGKMFNDEQISKLSKLNYSDWGRLSKKLLTDIKCYIDADGINFPVSILEAMEVSNKNLMELLSNKYEFISCIDDINNKYFGDRDISASELIDELYVSPAVKRGIWQSVRILEEIVSIIGHNPKKIFIEMTRHNEEKVQKSSRRHNLEELYKAIRKDPEYVELIKEFDSTTDTDSFKIKKLYLYFMQLGKCAYSKEKIDFDKLFTDSYDIDHIYPRSKTKDDSIHNNLVLVKAKYNREKTDVYPIDINIQKNMNSFWNFLYTKKFITEEKYKRLIRTSDLTDEELAKFISRQLVETSQSTKATAEVLKQIYGDSDICYVKAENVSDFRYGSSRQKDKNDIQKLFVKCREVNHFHHAKDAYLNIVVGNVYDVKFTKNPVNFIKKNKMGNKSNYSLNHMFCFDVERNGYKAWDSSETIKTVGRMMKSNDVRITKHVHPTRGELYDATIYKAKIAKTGSYMPLKSSKNTPLSDVTKYGGYTKIKIAYYSVYKYKFSDKNLIKTEIRLIPIPIYLSKNDDDIKEYVKNYLNDRVNSKLIDFTKIYDKLYVNSLIKINGYLYYLGGKTNDRVWIDNAVSIVLDDKIEYLIKRISNDIKYGYEINVSDDELMDIYESLAEKANKKIFYNRLSDFEKIFSNMDVKKKFVKLEKNDKCRVLLQLLNVLTDSQTTYKLEMVGLKHSRSNIGMKISNLEEFKVINSSITGLYSNEIDILNI

SEQ ID NO: 985 - protein, 1196 aa, Dielma fastidiosa
MKEKYILGIDLGVGSIGWSCMAVNNENEPIRIIDLGSRIFSAENGSMEDRRNARGLRRLLRRRKARIQKTKNLFISNNYFTKDEMNLFFEKEACKYDNPYLLKVKGLNNKLTIEELLICLVHYSKYRGFKSNRKVKDEHSTNSTASASEDQKLLYSIQTTENELINNQWTISEYIVNDPKFKDKIKNTSGEYKIGITREMIVKEAELLLNKQIEMNVISDQFKNDYLTILTKQLSFSEGPEWGPYHDPLSKMIGICKFDKQDRAPITSYSYELYIMIQKLRNITFYEEGSRIKNRLNNEQIKKLLEEAVSGKEIKYKNIQKVIGHQVNFPGLLLTKKDFMKIVSKSKEEKNKDKTLEELKNEAKNNISVYEMKNTKILKSQLKKLGYENVEVKVLDALANLLSRYKSDDEIRKGIEEDELLKNQDQLFKAAILKLDEGSFKEFGKLSFNMLYQLLPLMINEGMDYAQAMAALNLDHSQAHKNDTDYEELPPLKEVFEELDKTVTNRSVIATLQQTKMVINAIFARYGKPVAIHVEVARELTKNDTERKQLMDMQLSNQVTNTSLKMQIFNKYSDQFTSMAKISHDDLVKYKLFIEQGGIDPYTLALTNDEMAAKINEKTLFTREYEIDHIMPYSISFNDTFANKTLVRKERNLEKANNIPYEVFGRDSGYAKYEAWVLRTINDPKKQEIYLLKKIPDDLQEEFSARALNDTRYATKVICEILKYCFPSIKVKSFTGQITDKLKGVWGLKNLTHSYQNPSYILHDEFDEELKKKYDLLSIYITEEKNNKEIKKLKEEVVKLEKQRDQKNRKNHLHHALDAAIIACATDSLRRRVEIHEQNLRQNSSTMRKFKVSVVDPATGEISTQIINRTVADYGQLYDLTKNSDPRHFPMPYDSFRDEIKLRLYERDEATMKRGLMCLANYNAAQVNQCKPVIISHQYTKKVNGRLHKATIYGVAPKPKTENTVVLTNRMAVTDKKFDYKQLDKIYDKEGTQKAVYEAVKSWLSGYANGEEAYNSHKELPKNSNGNPIKKVKLDYDSPKEEILLHEEKKQYVEKENVIQTHVFRREDSDKLYFIGMDRYRVMNFKNDPEVLIWWGQSKNNRKIKYSELAREGYIPYVKLYKNQIILLELRNGAKGLCKVNGFSAGMFEITSILGDDYDILASGLQTKSKSRLIITVSTIKSIQPINVDILGKVHL

SEQ ID NO: 986 - protein, 1367 aa, Peptoniphilus obesi
MKNQKDYYIGLDIGTSSVGWAVTDESYNILKFNSKKMWGVRLFEEAKTAEERRDQRAARRRLERKKERINLLQEFFAEEIAKVDPNFFLRLENSDLYREDKDEKLKSKYTLFNDKDFKDKDYHKKYPTIHHLIMDLIEDDSKKDIRLTYLACHYLLKNRGHFIFEGQKFDTKNSFENSINDLKTHLHDYYNLDIEFDNKDLIEVITDKTLNKTDKKKELKAIIGDTKFLKAISAIMIGSSQKLADLFEEGEEFDDSSVKSVDFSTSSFDDNYGDYEAALGEKIALLNILKAIYDSSILEKLLNEADKSKDGSKYISQAFIKKYNKHGSDLKQVKNLVKKYSPEDYNEIFRAENVNGNYVSYTKSNMTNSERKKALKFTNQEDFYKFMKKKLESIKEKINDPKSDDMLLVDTMLKDIDFNTFMPKLKSSDNGVIPYQLKVKELEKILENQSKYYDFLSSSDEYGSVAEKIVSIMKFRIPYYVGPLNPDSKYAWIKRDDKKVRPWNFEEVVDLDGSREEFIDRLIGRCSYLKEERVLPKSSLLYNEFMVLNELNNLKLNAIAISEEMKKIIFEELFKTKKKVTLKAVSNLIKKEFNLTGEILLSGTDGDFKQSLNSYIDFKNIIGEKVDRDDCQKKIEEIIKLIVLYGDDKAYLKKKIKASYKDDFTDDEIKKMASLNYKDWGRLSKKLLVGIEGVDTSTGEPGNIMHFMREYNLNLNEILSSRFTFVKEIQKLNPIHDRKLSYEMVDELYLSPPAKRMLWQSLRIVDEVEKILGHDPKKIFIEMTRSSQEKVRKESRKNQILKFYKDGKKAFIKEIGEDRYKYLLSQIEREKESKFRWDNLYLYYTQLGRCMYSLEPIDLSDLASSNIYDQDHIYPKSKIYDDSIENRVLVKKSLNHEKGNEYPISEKVLNKNCYAYWKMLYDKKLIGQKKYTRLTRRTPFSDGELVQFIERQIVETGQATKETANLLKTICKDSEIVYSKAGNVSRFRQEFDIIKCRSVNDLHHMHDAYLNIVVGNVYNTKFTKNPLNFVKNREKARSYNLENMFRYDVKRGDYTAWIAEDKENSKNPTIKKVKKEIRGTNYRFTRMSHIGRGGLYDQNLMRKGKGQIPQKENTKKSDIDKYGGYNKASSAYFALVEADGKKGREKTLETIPIIIDNKSRHGKIDAVSEYLEKDLGLKNPKILVDKIKINSLIKLDGFLYNIKGKTRNRISIAGSVQLILNKDDQKLIKRIDKFLAKKKDNKDIKVSIMDNIKEEDLIALYQTLSDKLNKGIYSYKKNNQAENIKEASGKFKELSIEDKIDVLSQLILIFQSFNSGCNLTPIGLSSKTGVVSILKKINFQEFKLINQSITGLFENEVDLLKLWLEEL

SEQ ID NO: 987 - protein, 1341 aa, Veillonella sp.
MRFQNKKTGDYFVGLDIGTNSVGWAVTNEKYEILRAKNHRMWGSRLFEEGKTAEERRVHRAGRRRLNRRNDRLMILEDLFAEEISKVDKAFYQRLHESQYRQEHKTVSGPYFLFNDKEFTDEDYHIDYPTIYHLRVALMKAPAKDVRLLFLAIHHIIKYRGNFLHEGETFKTTGGLTDILQRVLACNEFSGLKQHIDDTALVKLLTNKGITRSDIAKQISELATDKLYRKQAKAFASLVLGLKANLDDLFNEPEYKELDSEIRTVEFSGKEYWEERDKYEPYLGESLFALDGCKTLYDTLLLSNIKPDGKYLSEAKVETFEKHHEHLESLKDLLKSNKALYNRVLRDDEKNLNNYITYIGKSEFNKRCSRDEFYKFLKQTIKDISDNENKAEIVQLMELDSFLPLLRVRENGVIPYQIHEEELEQILNVSSEKYPFLNKADGSGFTIAQKILKLLTFRIPYFVGPLNPAHKDRDNGFAWVVRKAPGKVYPWNFEDKVDISASATAFIENLTNKCTYLIGEDVLPKYSLAYSKFSLLNELNNLRYDGKPLSYETKQSFIKDCFEKEHRKMTEKRIREFLKHLGGTDGKGALTGLDVDIKSDLKSYRDMVRILGDGFDETMAERIIRYVTLFGEAKKVLLSTLEIEFGDDLSDTQKKQILKLQYRDWGRLSATLLKGIKGVAGDNPECSILECMEQQPLNLMEVLSSHNTYLAAIEEFNKERTEPTDIVDYKLVDDLYISPAVKRSVWQTLRILDEITKLRGSVPKKVFVEVARTNRAEKKKTDSRKERLLQLYKTIKDEGRNWTEEIKQRDAGDFNSKKLFLYYTQQGRCMYSGEKITSIGDLFTSKYDIDHIYPRSVTKDNSWDNLVLVKAELNREKKDIYPIEKDTQDRCISLWKQLLEQGLISERKYERLVRTTPLTADELADFVNRQLVETNQSVKAVTNLLKRLYPDTTICYVKAENVSDFRQEREFVKLRSLNAHHHAKDAYLNIVVGNVYHEKFTNNPRNFIKNARSDKKRPYSLNHMFDYLLQVGNKEIWNPKTDNNLVKKMMRNNDVQVTRMLVEQTGALYDATIYKASVTKSESYVPLKSSDAILSDVKKYGGFTSIKIAYYSIFRFYKKNSEEFETHIISIPVLKAGTLNSKEDYVAYGEEIMNKQKFDRVELVYKKLCMNSLVRINGVMYYLGGKTNNSLYIDSAISLVLPDNIAKKIKAVEKYIARVAENGNYKPQPDQVSPEFNMIIYKALTEKMKQPAFVGLKTNRENELEKETTITAFIAMTLIEQCKMLMEILNLLTQQKTTYALKPIGVSASRSTLGMNITGLSEFTIITQSVTGLQEKEIRII

SEQ ID NO: 988 - protein, 1387 aa, Peptostreptococcus anaerobius
MSDSKKFEGENVKSGDKKTNKNHGKVLKSSPKEIRKNTEYFIGLDIGTSSVGWAVTNTDYEILKFNGKRMWGSRLFNEASTAEERRGHRVNRRRIQRRRDRLNLLEEIFSEEMAKVDPEFFMRLKESKFHLEDKDERILGESNIIFKGSEDGDKKYYEKYPTIYHLRHKLMQSCEDVDIRELYMALHHIIKYRGHFLFKGDFEETGTSIENIIIELLELINNNLGVKKFEYNESLINELKNIVSNTSNTITNKKKLLGEFFNKKEYKAHKSLFILSIGASVKPVDLFLEEEYKDIDDIKNISFKNLEYDQVRDTYESIFLDKIEFIDVAKRLYDATILLSIKPEGKTLSEAKVDIYNKHHNDLELLKKVLKTDKEKYDSILKLDIKKGNNYVNYVKKSKNGISCSKEEFHNALKKVLVKIEKTDDIKYILNEIELERFLPLQRVKDNSVIPYQIHRYELKKILENASKKFTFLNEESDGHTNIEKIIKIMEYRIPYYVGPLNDHHSVYNNGFAWVSRKRSGRITPWNFDEMVDKEESAERFIENLTNKCSYLIGEDVLPKESLLYSEFSLLNELNNIKYDGISLPIDIKKSIVEKIFRVEKKRVTKKYIKEFLKQEGYSDGKGEVSGIDIDIKSDLKSYRDMVKIFGTEIDYRMAENIIKWVTLFGDSKDLLKTKINKEYGEKVSKDQLKKVCKLKYRDWGRLSKKFLTGIRSSVLVNDATGEGYTIIEAMRNTDNNLMQLLRNEYDYLKKIDQINMLSRKDIDEISHDILDDLYCSPAVKRSLWQTIKIVEEIKKIMGHEPKKVFVEVTRTNKADKKTTITRKNRLLELYSAINAESRDWVNELNSTEVSKFNSKKLYLYYTQMGKCMYTGKNIDIESLFTDMYDIDHIFPRSKTKDNSFENLVLVTRKANADKRDVYPIDPKIQTERKSLWDMLHDKKLIGDKKYDRLTRTTGFTDDEMSGFIARQLVETSQASKAAAEMLKLINNDSEIVYVKAENVSDFRHENEFIKVREINDHHHAKDAYLNIVVGNVYNEKFTKNPANYIKKGGGNNYSLNCIFNRNLDRNGKRIWDEKKSIDTVNRMMKSNDVRVTFKNRVDKGPILNKVTIHKASEFMDDGKKNKKGFPIKSSEKNGNNRLCNLYKYGGYKDLNYSHYTIVRYNVYEKKGLDIKYYMIPIPYYLCLCNINQHDYVYDYISNRSKKDVNNIEIIVNELKMGSLINIDGYNYYLGGSKPKTFYVDPAYQIILDKEIERCIKEIVKAKNNEYRFINTDKINKNLNMKIYKYIVNKKIIGVFRNRKWDKGEYLNSSETIEKFSGLSVESQCNVILRLINDMRGSNKGGANSKFDELEMTISRAEIPQTLSNVSSFKIINQSITGLFENEVTIV

SEQ ID NO: 989 - protein, 1070 aa, Acetobacter sp.
MAKDFEYILGLDLGETSIGWSVVRLNEGVPEHLERLGVRICSDGRDAQSHEPLSVARRIARGLRRRRDRYIHRRIRLTDVLVKYGLMPEDIKERKKLQALNPYRLRSEALDRKLEPYELGRVLFHINQRRGFKSNMKTDRKDSESGAMKQAILKTRAKMEASGARTLGEFLYFLNKDKTSTQEYVPVRMRSHSEKNKTVYEMYPDRAMYEDEVHKIFEQQELSPEAQTEIFNTIFFQRPLKPVELGFCEFEDGERRAYTASVVFQKFRALQQINQIYVQDDYERRPLTKEEKDILKHFLLEDFSALDKNGLLTWAKVRTLLKLQKKKFNLESERRKGLNADVTSWKLSNAACFGREWFSFSDAKKEEIVALITGAEKEEELIAELKTKYGLSDERAKNTANVSLPDGVASLSAKAMKKLIPFLEEGMLYDDAVKQAGYVFSSSFKGVLPEKYETFIEPESGECFDELPYYGQVLRRYVLGGVPSEENKLFPEKYYGKINNPTVHIVLNQLRKLINSLVAKYGHPRKIVVEMARDLKLSKKQKDAIAKEQALNERENKRIGAELERLDIRNNYDNRMKYKLWEDLSTDPTKRSCPFCGKQISQQDIFSPEFEIEHLIPFSRSFMDGRSNKVLSCRRCNREKGNKTPFEAFGNDSTRWNAIMGRVESLPENKRWKFASDAMSRFERDGDLLARMMTDTQYMARIARRYLCCAANPNQVYGIPGQLTAKLREHWGLNSILSDQKEKDRSDHRHHAIDAFVVACTDRGTLQKYSTERRDYAKPEMPSEKAPHIPFADFRLSDIKRVFDEIIVSHKPDRGNARAAILKGGTVAKLHEETYYGMGGEGSKKGTWKLIQRIPVSEIKKASDLDCLIDQKGTANPLRVLLVGASESEQEQIIASYFARRGTHKVRTYRERNKDVILPFKDKDGKLYRYAVYGSNAYAEIYCPDRGKNAGKWQVEIIPNYCAHQKGFIPKWRHTDAHAKLIMRLYRNDMVAYEKEGKTVIARVKKMGGNGVIVFRNHLIAKEEGDRLSWQAVVSGMQSANLRKIYVDVLGRVIDPKRPMTQNETDGQDN

SEQ ID NO: 990 - protein, 1353 aa, Roseburia sp.
MAAFKYYLGLDMGTNSVGWAVTDPNYNLLKAKGKDLWGIREFNEASTAVERRTHRISRRRRQREQVRIGLLKDYFHDAIGEVDPDFFQRLANSKYHLEDKDTEVRYKNNVFNDDDYTDKDYFDQYPTIYHLRKELIESTDKHDVRLVFLALLNMFKHRGHFLNSGLGENSGENNINNAYLELTNLLSEFTQYNLNETIDGKKIEDILSRRDMSRTRKAEGLAEILGVDYKNKPYKELIRGLCGLKFNACAIFPEIQSDEVPKLDICLSEASFDEKSDEIANILGEDYFEIIMAMKDIYDIGSLAGIMKGHNYLSQARVTSYEKHKEDLRLLKNVIRKYCSKEDYDNFFNSEADGSYASYVGSYNSKTKQRRVGNKRSSEELYKAIKKILKNVPAEDADVQRILMSIENETFLPKQLTASNGVIPNQVHAKEIKKILSNAERYLPFLREKDETGLSVSEKIMKLFSFQIPYYVGPTTEKSSKDGGNGWVVRKEEGQVLPWNIDEKIDMKATSEAFISRMVRRCTYISGEPVLPKSSLEYQSFCVLNEINNIKIDGERISVELKQDIYKEVFQKGKRVTKKQLCKYLHTRGIIEAEEQVTGIDVTINNALTTYGKFKAILGDDISKDSVQKMVENIVFWCTVYGDSKKFLKDRIEEKYGEKLTKEQIKRIVGFKFKDWGNLSKNFLELSGADVSTGESVSIIRALWNNNLNLMELINSRLYNYKERLAEYQNTMMKTLSDIEAEDLDEYYFSAPVKRMIWQTILIIKELVKVLGCEPDRIFVEMTRRPDERKMRTESRRKKFEELYKKVKDEDVDWMKVIAHADETGSIRSKKMYLYLTQKGRCMYTGKHIELSDLFNNNLYDIDHVYPRHFVKDDNIDNNLVLVCKEKNAHKSDIYPLEDEILASQKNMWSELRRSGFITEEKYNRLIGRNSFTDEQKAGFIARQLVETSQGTKGVANILQQLLPESKIVYAKASNVSEFRNTRDIPKSRLINEFHHAHDAYLNIVVGNVYYVKFTQNPLNFIKNDYDRDKTKNNYNLSKMFDWDVERNGEVAWIAQKKDGEAGTIATVKKVLGRNTPLMTRYSFEGKGGLTNETLYSAKKAKEEGYIPFKSSDEKMKDVTKYGGFTSVTGAYFFLVEHTEKKKRSRMIESVPLYLAQKIEQNPHELEKYCEQVLGLIDFDIRVRKIKIGSLIKRKGYFFYITGKTGHRLILRNAVNMCLKKEWVKYISKLEKAVDKNNVEGIITKEKNELLYSELIEKFKNSIFSNRPNPVGDKLDEAKEKFINLDIEKQCIVLCQILQLSSVLGSECDMTLLGESAHCGKILISKKIGDEDIYLINQSVTGLYEKKINLRTV

SEQ ID NO: 991 - protein, 1433 aa, Bacteroides sp.
MKKILGLDLGCNSIGWALVNEAENTEEISSIIKLGVRVNPLTVDEMQNFEKGKSITTNADRTLKRSMRRNLQRYKLRRDTLIEVLKEHGFITDSTLLSEHGNKTTFETYRLRAKAAVEEISLEKFARVLLMINKKRGYKSSRKAKGSEDGVLIDGMDVARKLYEEGLTPGELCLQILEAGKKNLPDFYRSDLQNEFDRIWNFQKQFNPELFCDAVKEEVRGKNRSQTWAILVKFFVWSEKEAVWNEKEARTEERVKEYKLVGLKRDTKGNELKLENYRWRVQALSEQLNPEIVAIVLQEINGQISASSGYLGAISDRSKQLYFNRQTVGQYLMSELEKDPNVSLRNRVFYRQDYLDEFDRIWEKQAEFHEELTVELKKEIRDIIIFYQRRLKSQKGLISFCEFEKREVVVEEDGRKKNKTVGCRVIPRSHPLFQEFKIWQTLNDIEVFAWDKQSKRKKADKSSILFDNSEDALLVEGKRFLYQEEKELLAKELFVKESMKKAEVLKLLFENYQELDLNFKQIDGNHTGFALFSAYSKMIEKYGYEPVDFKKSADEIIEKLETIFTNLGWNTELLSIDLSKEDKELERQSYFRLWHLLYSFEGDNTPTGNGKLLEKIMQLCDVEKEYAVELANVSFQEDYGSLSAKAIKKILPYLKEGNQYDVACDYAGYRHSKSSLTKDEIENKILKDKLEILPKNSLRNPVVEKILNQMVNLINTLIDTYGKPDEIRVELARELKKNAKEREELTKSIARNTREHDEIRQLLRTEFGMMNVSRNDIIRYKLYEELKDNGYKTLYSNEYIPREKIFSKEIDIEHVIPQARLFDDSLSNKTLEYRAINIEKGNKTAYDFVKEKYGNDGLEKFLNRCETLFKDKRTKLRKLKMEEKDIPEGFIDRDLRNTQYISKKAFAMLNEISRRVVATTGSITDKLREDWQLVDLMKELNLPKYEKLGMVEMFEDKDGRKIKKITDWTKRNDHRHHAVDALTVAFTKDVFIQFYNNKNAAWMPASKEHANITGIKARYFENGKALAPMPLAQFRAEAKRHLENLLVSIKAKNKVITSNVNRTKNKNGENRKLQQTPRGQLHLETVYGSHRQYATKIEKVNAAFDAAKIATVSKLAYRNALLKRLEAFGNDPKKAFTGKNTLEKNPLYLDENQTEMVPEKVQTVEFETVYTIRKPIDPNLSIDKVIDVKIRSVLEKRLKEYGGDAKKAFVNLDENPIWLNEAKGISIKRVSIRGISNAQSLHEKKDKDGNLILGKEGRKIPVDFVNTGNNHHVAIYKKPVLDKVGQIVLDEEGNPKYELDEVVVSFFDAVTRANLGQPIIDKDYRRIEGWQFLFSMKQNEYFVFPNEKTGFNPKEVDLLNPENYALISPNLFRVQKFAYKNYVFRHHLETTIKDTSSTLKGITWTDFRSSKGLDKIVKVRVDHIGQIVSIGEY

SEQ ID NO: 992 - protein, 1374 aa, Ruminococcus flavefaciens
MANDKTYLGLDIGTDSVGWAVTDGEYKLKKFRNNLMWGVHLFDEAQQSAERRSFRTARRRLDRRQQRIKLLQDFFAAEILKKDEKFFHRLKESSLLPEDSENRKKNTFFDDKNYGDKEYYKEYPTIHHLICELMDSNEPHDVRLVYYACAYLLAHRGHFLFNVNKDKIDRITEFKPIYTNFYNALIDIVETAPFDENADGMAEILKKHISVTNKDKELKELLFGGKVPKAEDESNIVIKYDQLTKIISGGTVKMSDLFCNEDYKELEKNSVCVKNADFSDTLDMLTGQVDELHLCLIASIKAMYDWSLLVEILAGNKMISISKVEIFDRHKSDLQELKYFVRTYLTKKEYDAIFREISDKSNYVSYVYNAPSENERNKYKKCSQEDFCKFLKTYLESIKPVYEDNERFEELLKKCQNGELCPKQVTTDNRVIPYQLYYAELKKILDNACNYLPFLNEKDEYGTVADKILSIMEFRIPYYTGPLVVSDKSKNAWIVRKAEGKIYPWNFKQIIDEDASENEFIRRMTCKCTYLAGEEVLPKYSLLYSKYTVLNEINNIKVNGVPITVEQKQKLYQDMFVSSNRKLTKKRIAEYFKSIGVYKGEIEISGVDDNIKSSLKSYHDFKQLLENGVLSENDVERIIERITVTTDTKRLKNWLEENFKHISNEDIKYISKLKYKDYGRLSRRFLEEILPIDDKTAEVLDEKNIISMLWESNNNLMELLSSNYGYSKAVEVSNKYYYALPENQKSISEQLKDMYIPTAVRRSVTRTIDIVKELKTILKKAPDKIFIEMARGEGETPKGKRAQSRRDLISQILDDADADNIPELKNKLDSIDDGKLRSEKYYLYFMQLGKCAYTGKAISFEDLEDNHKWNIDHIWPQAKIKDDSLDNKVLVDTNTNGAKGDSYPISSDIREKMQGFWHSLHKKGLMSEKKFSRLIRNTPFSEEELSGFIARQLVETRQSTKAVATLLKELFPDTDIVYVKAGLVSEFRHEMDMLKCREINDLHHAKDAYLNIVMGNVYDTKFTKSPLNFVQSGERYSMKLFKKDQNGKESGLLTGKVQRGDTIAWDPAVSFKTVRDMMAKNSIRYVKYTYKRKGGLFNQMPERKKEGLVPRKIGLDTSKYGGYNNTTASYFSIVKYNKNSIVIIPIETMYAKRFEIDIDFAMNYAADTLSSILSEVITADMVSMPMKNRALKINTLLEIDGFRCNIVQKSNKGRTLVIASSESLIVPPESYNYIKKICSFLEKSEKGKKYGVNSYSGINSDSNIELFDLLVRKMLSKPFNNILQKIGEKISKQRETFIGLDVTKQTIALYNIMMLMKTGRSTGCDLKAVNESGQAGVITMNSDLSKIKGKKIIRIIDQSPTGLYEKKSVNLFEL

SEQ ID NO: 993 - protein, 1170 aa, Aliiarcobacter faecis
MERILGLDLGTNSIGFALNKVEEKDSITIFNELASNSIIFSEYVPSTDRRAFRSGRRRNERASRRKENIRKLFCYFNLASKNILDNPIEYFNNLTKLYKEPYSLREEAIKGKKLSKDEFTFALYTIISRRGYTNLFAKEEDENKAKESEKINSAILNNKNIYKNSNYTLPSKVLTLKKEELEEDGFINIAIRNKKDNYNNSLDRKLWQEEAELLIESQKNNIELFKDIKTYEDFKNKFINGVNKNSKGIFEQRNLKSVEDMVGFCSFYNLYSKEPQKRVINAHIKAIEFVLRQRIENSILGNLILNKKTGEFVKISKEDIETTINFWLYTPNVQTITAKNIFKNAGLKDLEIQTSDKQDDTVQDISVHKALLEIVDFETILKNEEFYSKLLEVLHYFVSEQQIKDEIKKLNKENILSEEQIDKIANINKAKSSYLSFSLKFIDEILQKLKNDISYQTCLEELGYFKRYTQMEAYNYLPPLNPSIEDIKWLEKNVKNFKSEQLFYQPLISPNVKRVISILRRLVNELISKYGKIDKIIIETARELNSKKDEDKIKKSQEQSNKEIKDAQTLLKSGNKELSNKNILRARLLKEQKSKCLYSGEGLTLEEALDENITEIEHFIPRSKIWIDSYKNKILVLKKYNQNKSNQHPVSFLKSIGKWENFVGRVDEFIANKDKKICLTDEKNIQKIWDNEKLEDRFLNDTRSATKIVANYLEHYLFPKQNEYGKGESNDKVIRVTGKAINELKKLWGINEAQPKNEEGKKDRDTNYHHTIDAIVISLLNNSSKKALNDFFKQKEDKFKTKAILEKLKTRFPISKNGKSLFEFVKDKVEKYEKNELYVCPYMKKRENIRGFKDGNIKLIWDKELNNFSQIDKVEINKKLLLNNFGKDLKDDEVKKEFEKIKDKLNLPKQNNIKIALEEYEKRLLEIRKKINNISEEIKQEQNNLPRDKKAIETVEILEIKNRIEKLEQTKKEFVKELEFPCFFYTKDGKKQIVRSLNLKSNSVTKADSIIITDKKQKNRVQRLTKEVYENLKSSKTPFVAKLNDNTLSVDLYNTLKGQLIGLNYFSSIKNDILPKIDERKIKLISNYDDKITVSKNNIIEIEDLKNGTKNYYTCNGGGEIGKGKNVIKVDNINTKNKSVIPIQIADYRIVKPVKINFFGKISYEEFKKN

SEQ ID NO: 994 - protein, 1147 aa, Bifidobacterium thermophilum
MSDKTYRIGIDVGLYSVGLSAIQVNDDDDPVRILNAQSVIHDGGVDPNAQKSADSRRAQSGIARRTRRMRRNRKKRLKRLDQILVESGFPVSSENDLEGFEPWLLRAQAADAFIEDEDIRKRAISVSCRHIARHRGWRNPYLDVRTLLAVDSPSSAFYDKLVENAALEMDGQMPDSDATPAQIVRDVLEYKRGEAAIRLRKSTAENKKNRLALFPEKMMQDDYAYELRLILAKQAVPKDIARKLILAVFQSQSPKGSAEKRVGKDPLDPSQPRALKASLAFQEYRILNILTNLRLQDGGAERRLSIEEKQKLYKMLVEDTGREKKYETWTDIASAMEWKRNWLKGVGSLTADGDDRVTSRPPHIDIVEKLNGIKDTKFRKSILSWWKSATDVNREAMIALLSNTVDIAKKQDDPDFSSAVDFIDSMDDSDLQILDTISIQPGRAAYSSKTLRALSKRMYSTDDDLHDARKHVFGVDDSWRPPQPAIGAPLGNPSVDRVAKIVNRWLLACQSRWGNPLSIQIEHVRDALSSAATATADKRAYERALGKRNAEKMKVKNELRLQGLNEPHESDVRRQEAITRQQGKCLYCGDDITFSTCEMDHIVPRKGHGSTNTRDNLAAVCIQCNRQKSNTPFALWCQTPEAKSRGVSLEAAIHRVKGFFTESKELTGRQAKVFTSSMIMRLKQTTADDPIDSRSIESVAWMADELHRRIDWHFNGDASESDHGRRVLVAVYQGRITSEARNVMRFQAGGDFHFVGGHGKTRLDRRHHAVDASVIAMMTPAAALTLAERINLRDSQRCIGRIREGEIDWKQWPNEPTEKYQHWLDNGKRLFALINDALDNDRIPITHWQRYALGNSIAHEATIHPLRKIPLGSAIDYETISRAATPALYCALTRCPDYSVNDGLPENKQRHITVNGKVYGPEDEVAFFASDHVELAVQGGSADIGKTIHHARVYRCYFVDRRGQKKWFYGMIRVFRVDLIHARHENLFTYPLPSQSISMRYAETRTAEAVLCGHAEHVGNLVAGDEIEVPMIGKLTGKIDTFAKFFNESLNNEYVAERWSIDGFDSESKLLLRPLMLAEEGIANWEDNSHLSIPDDVKGLIARGWRPSVDTVFAKKPRIVRRNVLGEPRWKSRSGMPVSWRVTGSEA

SEQ ID NO: 995 - protein, 1424 aa, Prevotella sp.
MTQKVLGLDLGTNSIGSAVRNLDLSDDLQWQLEFFSSDIFRSSVNKESNGREYSLAAQRSAHRRSRGLNEVRRRRLWATLNLLIKHGFCPMSSESLMRWCTYDKRKGLFREYPIDDKDFNAWILLDFNGDGRPDYSSPYQLRRELVTRQFDFEQPIERYKLGRALYHIAQHRGFKSSKGETLSQQETNSKPSSTDEIPDVAGAMKASEEKLSKGLSTYMKEHNLLTVGAAFAQLEDEGVRVRNNNDYRAIRSQFQHEIETIFKFQQGLSVESELYERLISEKKNVGTIFYKRPLRSQRGNVGKCTLERSKPRCAIGHPLFEKFRAWTLINNIKVRMSVDTLDEQLPMKLRLDLYNECFLAFVRTEFKFEDIRKYLEKRLGIHFSYNDKTINYKDSTSVAGCPITARFRKMLGEEWESFRVEGQKERQAHSKNNISFHRVSYSIEDIWHFCYDAEEPEAVLAFAQETLRLERKKAEELVRIWSAMPQGYAMLSQKAIRNINKILMLGLKYSDAVILAKVPELVDVSDEELLSIAKDYYLVEAQVNYDKRINSIVNGLIAKYKSVSEEYRFADHNYEYLLDESDEKDIIRQIENSLGARRWSLMDANEQTDILQKVRDRYQDFFRSHERKFVESPKLGESFENYLTKKFPMVEREQWKKLYHPSQITIYRPVSVGKDRSVLRLGNPDIGAIKNPTVLRVLNTLRRRVNQLLDDGVISPDETRVVVETARELNDANRKWALDTYNRIRHDENEKIKKILEEFYPKRDGISTDDIDKARYVIDQREVDYFTGSKTYNKDIKKYKFWLEQGGQCMYTGRTINLSNLFDPNAFDIEHTIPESLSFDSSDMNLTLCDAHYNRFIKKNHIPTDMPNYDKAITIDGKEYPAITSQLQRWVERVERLNRNVEYWKGQARRAQNKDRKDQCMREMHLWKMELEYWKKKLERFTVTEVTDGFKNSQLVDTRVITRHAVLYLKSIFPHVDVQRGDVTAKFRKILGIQSVDEKKDRSLHSHHAIDATTLTIIPVSAKRDRMLELFAKIEEINKMLSFSGSEDRTGLIQELEGLKNKLQMEVKVCRIGHNVSEIGTFINDNIIVNHHIKNQALTPVRRRLRKKGYIVGGVDNPRWQTGDALRGEIHKASYYGAITQFAKDDEGKVLMKEGRPQVNPTIKFVIRRELKYKKSAADSGFASWDDLGKAIVDKELFALMKGQFPAETSFKDACEQGIYMIKKGKNGMPDIKLHHIRHVRCEAPQSGLKIKEQTYKSEKEYKRYFYAAVGDLYAMCCYTNGKIREFRIYSLYDVSCHRKSDIEDIPEFITDKKGNRLMLDYKLRTGDMILLYKDNPAELYDLDNVNLSRRLYKINRFESQSNLVLMTHHLSTSKERGRSLGKTVDYQNLPESIRSSVKSLNFLIMGENRDFVIKNGKIIFNHR

SEQ ID NO: 996 - protein, 1034 aa, Helicobacter rodentium
MKINLQNWGQIMKILGFDIGVTSIGWAFVEGEELKDCGVRIFTKAENPKNGDSLAAPRREARSTRRRLARRKARLNTIKRLLCEEFGLNLSDYLANDGELPKAYETTKDTKSPYELRTLALEQKLEPKELARVILHIAKHRGYGNKHAKTGSDKDSGKVLSAIKVNEATMNAKRYKSVGEYLYKEFYQKERYEKKGNTLTKEFKNVRNKGENYEHCVAQEQVRAELELIFQKQKDFGATFSENFESQILETAFYQRDLKSFADKVGECVFYKGENRAPKDSLSAMEFVTLTRIINTLKNLEEKSKNLGIGETYGKDKIQEILKVVLDKGEMSYKKLREILHLDERILFAKDPKLDYTKGVQEAEKAKFIELKNLKTFKKAMGGDFGKFAREELDNIATEITLIKSKENLAKKLQNYPALSKEQVEALSNLNFAKHIDLSLKALHRILPFMYEGLRYDEAVQKAGLQEHKKHLQKGEFLIPLKEYEPYLANPVVARALSEYRKVLNALLRKYGAVHKIHLEFTREAKLSAKERQKYEKEQRGHFEANQNAIKQCEILGLPLNGANILKMKLWIEQGECCVYSGDKITESDLKDSNALQIDHIYPYSRSFDDSYMNKVLVFSKENQNKLNKTPYEAFGDDKEKWDRILSFSTKLPKQKQRRISNTNFKDKEGGFLARNLNDTGYIARLASQWSKDCLEFLPLSENEVNIAGEKGSKKHIEVISGSLTTTLRHYWGLGDKDRNNHLHHAVDAIILAYTNAKTIKAFADFRKNQEQNKAKFYAKQIAESEYEEQKAFHKAQVKVFRQRVEEKINEIFVSKPPKKRARGALHEETFYSFEDEKLLKSYGGKQGIEKAISLGKIRQVGTKIVSNGIMVRVDIFKDKKGKFYGVPIYTMDFALGILPNKAVAIGKDKEGVIKDWIEMDSNYDFCFSLFKDDLILVQKKEMKKAELCYFVSFGSANAQINVEKHNNKFEGLSENEKILYSNATQKEVAGKSIGIQNLKTFEKYQVSPLGEVQKAEFESRQEIKLKSSPKRKG

SEQ ID NO: 997 - protein, 1415 aa, Lachnobacterium bovis
MSRKEQEYFIGLDMGTSSVGWAVTDPQYKLLKFRGRDMWGMREFDEANGADSRRSYRIARRRHKRELFRLNFLKDQFREEIEKVDPNFFIRLENSKYHKEDKASVLKGSMNAIFDDKDFKDQDYFEKYPTIFHLRKALINDEVPYDEKYSRLVFLALHNMYKRRGNFLNTSLSDKGGEVSRPIAEIYKDLQMNCNELFGTAFPENVDADELQDILQDNSISKTAKKEKITELLGLNKKQKKEENIILLICGLAAKLKDFDENVEDSLKKETMKFSEENSDEKEENSDEKEEIWMKNLGEERYSCLMTVVKELYDSAVLNEILHGKDYISEARVESYDKHKKDLKLLKKAYHLYADEDTYEEMFRSEKDGTYCAYVNGYGVKGKSKKARRDYKKRSREELYKRIEKDLNLKKRLKADPLNEILTKIKNDIDIEAFLPKQLTAENGVIPNQIYVREMRKILSNAEKYLDFLKQEDISIESEEFKTVSDKIIAMFKFHIPYYVGPTTEKSKEFGGNGWVERKAEGKIYPWDIETKINMTKTRENFIQNLVRDCSYLCNEKVLPKHSLLYEKFSVLNEINSLKIKGKKIDSSLKQEIYNELFMHNAKVNKEKLVKYLINNGFMESKEELTGIDINIKSALTSYDKFCKVFGDDNMKKDSYRKAAEDAIYYCTIYGDSRKLLKDVLKKEVFGSKYGVEADDKQINRIIGFKFKDWARLSRKFLELEAANVEPGEARSLIGVMWETNMNLNEVLFSDKYNFREILEEKRRKEISTIQEFTFDDLSGMYFPNPVKRMIWQTVLVVKEIEHIMGHAPAKVFVEMTRSEDDKKERKDSRGKQLEELYKKIKDENKEWAEGQIDKIKEYDSNGMLKSKKLYLYYLQMGKDMYTGKPIDIEDLLSNNSKYDIDHIYPESVSDDSNISNNLVLVSKEMNNKKSDTYPIDENIRKKCYPLWKTLLEKELITQEKFYRLVRNTELTDEEMARFIARQLVETSQATKGVTELLKMLFKNQGTKIVYAKAKNVSRFRHDYGFPKSRLINDFHHAHDAYLNIVVGNVYYTKFTQNPLNYFAQKRKAEANGSKDNKDNLRKMFKWDVQRNGNIAWIAPTKFEPKKDEEGNDIPGTYNEYKPLDGTFMTVKKMLGRNTPILSRMCVTVSGGIADATITSHLKAEEGKYLPLKNSDSMFSDIKKYGGYKSISIAYFFAVEHMNKKMEKIRTIEVVPIYLEKKIESEERGLEKYCVDILKLSNPRILVKKIYKYALLKKDGYYFHITGKTNNSYYILNAVNLILPLNLVEYSKMLEKEKLSPKITYEKNVLLYNVLVEKYKETILALKPTPKVVKHITSSFEKFKDLDLEGQRKILMEILKFSSIGKQPADLSLIGGVKSAGIPTIGKEFSKSTEFKLINQSVTGLYQNEIDLLSI

SEQ ID NO: 998 - protein, 1418 aa, Lachnospira multipara
MQDYYLGLDVGTNSVGWAVTDEHYNLVKAPVKGKNKNHDMWGIRLFDTAETAKKRRTYRSSRRRLQRRKNRIALLQEIFKDEMAKVDDTFFIRLNESSLHKEDKSIQYKHPLFYKSEYTDKDYYRDYPTISHLRSELIHNPQEHDIRLVYLALHNIIKYRGNFLVENDYNENNNRDITEIFSEIVSAFDDYGISISCKDLSKLKEILTNDKLKKSDKSREIADLIIISAKKDEEEINEDKAIKAFSNLIVGKTGNVLELLYKIDKENVSKEDKTVFSINFSDSDYDYTQNENQTQREKLEDIIHDEIELIDIIKTLYDWKVFVGIMGDYTYISDAKKAQYDYHKENLKKTKYLFKTYLSEDEYKEFFHANKDESCTYSAYVGVSAKPKSSIKKCSEEKFYKQLNNKLLSIKDKIKEKDKDIYDTCLIGSDTEYCTLLPILRSKNNSTIPRQINELELKRILENASKYLPFLLEKDSKYNKTNIEKIISIFEYKIPYYVGPLSLRHVKDVNDRIKNGSNAWMIRKEGKENEYIYPWNFNDVVDKEKTNEQFIVRMTNKCTYLPQNDVLPKNSMLYQKFELLNMINNLKIRGNKINVELKQELYNKLFIGGKNIKFDTILNYLNNNYNMELDKNDLSGISEDFEFALTTEANFKKLFNKSSLTMQDKKIAEDIIRWKTIYGNDNALIMKVSKMNYPELSDEIIKNIGKMAKMKGWGNFSKEFLTSVYCEEMFSKKTGEQLSIINALWETNENLMQLLSNKYSYLDEINKINASVRGEITDFSYESCVENLYTSPQNKRAIWQTLLIIEEIVKVMGNAPSKIFVEMARGKDKNAKKTKSRKEQLKELFKNCKKDIENVDFDKLTNTLESKNNSDLRSKKLFLYYLQQGKCAYSGENIILDKLLSENSEWDIDHIYPQSKFDDNGLNNIVLVRKELNAKKSNELISQSIINKMKPTWKWWLDNKFISKEKYYRLTRTTEFSEEELSGFLARQIVETRQSTKIIADLIRQIYTSSKVIYVKAHLVSEFRQEPLNVLKCRAVNDYHHAKDAYLNIVVGDVYNTKYTDNPYKWMQKNKDSNYSITKTMFWDVKNIKGETVWVGCDKKDSVDGNGKSHKEFLKNDKGEIIGGDIERIREIVKKNTCFYTEYTYCDKGQLFNARLEKRNSGKLAIKKNLNISNYGGYTGIKPSYFALVEFAEKKKRKKQIIGVPIYVDNMLKHNENAFIEYCTNNLKLTNVVVLKQKIKMNSLLSMDGYPMRIRGDKGKENDFKNNLQLVLDEKHYEILRHVEKYQIKKSSLSKDEKKTIKINEKFDCIKGEDLISLYIVFLEKLKGPYKNRPANKYNLLEEKIDDFKGKSLEDKADVVFEIAKFFSSNATTSSDLKLLNAGSEVGRMTKTKNFVNNSKVKLINQSITGVYEYKERL

SEQ ID NO: 999 - protein, 1106 aa, Kandleria vitulina
MGRLVLGLDIGITSVGYGVIDIDNNVFVDYGVRLFKESDSENNVARRAHRGGRRLKRRRKNRLDDMKKLLFDAGILTKDYNPIKNIYEVRVKGLTEKLTNNELAAALLHITKNRGTTIEALESADADKEALGTKSVLAKNKEELREYEYICKVQLHRLKEYGNVRGTENNFKTIDYVKEARAILEYQGIDVELSDRILHIIQRRREYYEGPGSEKSPTKYGRWIEKGVEPIDLIEKMRGKCSIFHDELRAPKSSYSAELFNLLNDLNNISINGEKLTQEDKELVISEVNKIGEIKVNKLLKILNTKEEDVEGFRIDKNGKMLITDMKCYDQFKKIFDKNNEYAYRENKEIIDQIAEINTSKKGISERCEAIQKKFPAFDLNLVRDLAGMKGMTQYHSLSLKAIKIINDEMMKCPYNQMQVIHELGLQHYRKSYKGMKKIQADDEAILSPVAKRAQRETFKVINRLREIYGEFESIVVETTRDKNSAEKKKRIKNTQKYYEGRNKNVDKLLKEKGYDPALVNGKTKMKIKLYLDQDGKSAYTLVPLDLNLLISDPHAYEIDHIIPISISLDDSFNNKVLITHEENQIKGNRTPVFTYLNGLFKNCDLNTYKSAVKNNHNISRKKKHYMLYDKDITKYSNMKEFIARNLVDTSYANRVVLNTLTSYFKDNDISTNVHTIKGFATSLFRKRINLPKDREEDYLHHAIDALIIASVKKQPIFRDYLAKYNLDELYNKETGELIKVEDDDRVIDPVYIEFISNLKTIYEQSNQYYNGYISREEMKFKPIKISHKVDTKPNRQISDETIYSTRNVNGVERVVKKAKDIYDPKFAALTNDIINNQYHDKWIMAEKDEQTFEIIKSIVMEHFNTYKDDKDIYKSEVKKGVTVWSLKGSNNPLSHFKEEHGKVRKYSKKGNGPEITAMKYYEDKLGNYVDITSKYNVHDKNVVLLQISPYRTDFYLSPKGKYVFVTIRYSNVFYKESMKKYVIDEDWYENEKKRKKIDESYQFVCSLHHDELLGVKLKDGKAYIYDQSTEGDGIKRHHHGQYEILKFTATNNDKNNKIEVKPIYTYCKKQCMPSCGTFIKLTKFATDVLGNLYEVKDNVLKLEFD

SEQ ID NO: 1000 - protein, 1486 aa, Prevotella sp.
MKTILGLDLGTNSIGWAVVFVDDEGKFVQKIKLGSRIIPMSQDVLGKFDSGVTESQTAVRTGFRGVRRIRERNLQRRERLHRVLHTLGFLPKHYDSAIGWDRNRPTTYGKFLDHAEPKLAWEQQEDGSMRFLFMDSFCEMMADFARCQPHLIANGRRVPLDWTIYYLRKKALTQAITKEELAWILLNFNQKRGYYQLRGEEDEENPTKKEEYYELKVVSVEADENNKGKDTWYNVHLENGWIYRRSSKISLDNWVGKTKQFIVTTEYEKDGITLKTDKEGNVKRSFRAPKEDDWGLLKKQTEGQLEKSGKTVGAFIYDHILDNPSDKIRGKFVRTIERRYYKDELRAILTAQSKYHEELRDGTMLAACAEELYKGNLPHQQSLLKKDMSYLLLDDLLFYQRPLKSKKSLIADCPYEYYEYVDKESGEIKRQTIKCIAKSNPYFQEFRLWQFIINLRLFDRTDDKEVTEEYLPSKEAYARLFAYLNDRNDINQETLLKDFFKLKKEKMGNDKVYPIRWNYIEDTSKKYPCNETRHELLVALQRAGIDKEWLADKRLEYRLWHLLYSVEAKSEAETALQKLKDDEAFVNSFLKVKPFKKEYGAYSEKAIKKLLAVMRMGNDWNEDNICVDTRKRIEDIINGDIDEKIRSRMGQGMRSFESVSDFQGLPEWLACYVVYGRHSEATEIQRWETPEELLNYVRFGFKQHSLHNPIVEQCILESLRTVHDIWKEVGHIDEVHIELGREMKSTSAQRASRTQAILKNENTNLRIKSLLMELKNDAGIENVRPFSPMQQEILRIYEEGALLELTKEDKQFDEISKISQMAQPTANELTKYKLWLEQKYRSPYTGKQISLAKLFTSAYQIEHIIPQSRYFDDSFSNKVICESEVNLLKSNMLGYEFIKNHGGEIVHCTMLGDVKVFNEDEYKAFVTEHYSAQEAKRKKKNLLLEDIPDEFLNRQMNDSRYISKVVRTLLSNIVRTEDEMESTSKFVISCTGGITDRLKKDWGLNDVWNSIVYKRFERLNQITDTEAFGHWENKDGKRVFQTSVPLELQRGFNKKRIDHRHHAMDALVIACASRNIINYLNNESANSPEKREDLRRKLCDKNRIIRKPWETFTQDVRKALEDVVVSFKNYVRVINKATNYYEKYDESGKKIICKQKGEDMWAIRKPMHKDTVFGRVNLRRKETVVLSKALDNISSICNKELRKYINGLIAKNFNKKQLLAHFKSLNYRWNRQYVSKIDVWVNSDEKEPMVATRKPLDISFDKKRIESITDTGIQKILLNYLASKGDDPAMAFTPEGIAEMNKNISLYNNGKYHQPIMKVRLSEPLGAKFPIGQTGNKKEKYVEAQKGTNLYFAIYENDKGERSYNTVPLNEVAERLKQGLSPVPEVDDQGVPLKFYLSPNDLVYVPSEEEVALNECRMDKSRIYKVVSGTGKDCFFLPNRISKPIFEKVEFEAKNKLGRALSGEMIKTVCWKLEIDRLGNIRKIIK

SEQ ID NO: 1001 - protein, 1023 aa, Bryobacter aggregatus
MFIRKPEGYYVLGIDLGVASVGLALIETRFGEICHSSVRIFSEGMTGSEKDWENGKEVSNATVRREARGQRRQTERRKRRIKKVFHLLRSYDWLPDVSGPNIQDALNALDLELANRYGQHHNLPYFLRARGLDEKLSLTELGRAIYHLAQRRGFLSNRKLAPKKDDDMGKVYAGIDSLREEVSSSGKRTLGEYFASLDPEEQKIRGRYTYRDMYVQEFQHLWAAQQNHHPEELTAVRQATLFRALFFQRPLKDQSHLIGHCDLEEKEQRAPMYLLSVQRYRFLTALNNLRLAGPGAVSREISADERQAIIEKLGQCAKLSFTEIRKMLGVPKTFKFSIEEGGETKIPGNLTASLIYGVCPALWTGLDQASRDRLVDVLKRLESVESLDDRALALRNHWDVSDDEIDKLLSLKLPSEYASISLRAINRLLPLLEEGLTFAAAKHQLYPETDNCQVESFLPQVKDVFREIRNPAVLRSLSEMRKCVNAYIRHFGKPDEIHIELARDLRRSKGDRAAMTKEIRQNELARKKAYAALIENGIPNPSRWEVEKFLLWEECRRECPYSGKAISFHSLFVEQQFEVEHIIPYSRCLDDSRANRTLAHVEYNRIKGNRTPVEAFCGREDWPEMKGRFARFARTAKLRRFLMTETDAAELLKDFTERQLNDTKYASKLAAKYLARLYGGKSDETGMRVLSCAGKVTSALRRVWDMNRVLNVVPEKSRDDHRHHAVDAVAIALCSSKWIKALSDASAKTLHRRPLRSALLADPWPGFRDDLNQKIHEQTPVSHRPKRKLSAALHGDTIYSRPQIHNGKAVFHLRKPVFNLESEADIGKIVDPVIRECVREKFLEVGRDAKRLEHDVPRMRSGVPIRTVRVRQTSVSAVALGTGAAKRYVNLGGNHHMEMIAILDDDCKETGYEASVVSYLEANQRKRRAEPIVKRDHGLNRRFLFSLSAGDIVQYGRNGQTLGFWLVRGVTTDQKGRLDLCRLTDARIKSEQERERPTAAAFLKAKGRKVNIAPIGTWTYAND

SEQ ID NO: 1002 - protein, 1335 aa, Sharpea azabuensis
MAKNKDIRYSIGLDIGTNSVGWAVMDEHYELLKKGNHHMWGSRLFDAAEPAATRRASRSIRRRYNKRRERIRLLRDLLGDMVMEVDPTFFIRLLNVSFLDEEDKQKNLGNDYKDNYNLFIEKDFNDKTYYDKYPTIYHLRKELCENKEKADPRLIYLALHHIVKYRGNFLYEGQSFTMDNSDIEERLNSAIEKFMSINEFDNRIVESDINSMIAVLSKIYQRSKKADDLLKIMNPTKEEKAAYKEFTKALVGLKFNISKMILAQEVKKGDTDIVLEFSNANYDSTIDELQSELGEYIEFIEMLHNIYSWVELQAILGATHTDNPSISAAMVERYEEHKKDLRVLKKVIREELPDKYNEVFRKDNRKLHNYLGYIKYPKDTPVEEFYKYIKGLLAKVDTDEAREILERIDLEKFMLKQNSRTNGSIPYQMQKDEMIQIIDNQSVYYPQLKENRDKLISILEFRIPYYFGPLNAHSEFAWIKKFEDKQKERILPWNYDQIVDIDATAEGFIERMKNTGTYFPDEPVMAKNSLTVSKFEVLNELNKIRINGKLIAVETKKELLSDLFMKNKTITDKKLKDWLVTHQYYDINEELKIEGYQKDLQFSTSLAPWIDFTKIFGEINASNYQLIEKIIYDISIFEDKKILKRRLKKVYQLDDLLVDKILKLNYTGWSRLSEKLLTGMTADNEFGSKATVLFVLENSNKNLMEIINDEKLGYKQIIEESNMQDIEGPFKYDEVKKLAGSPAIKRGIWQALLVVREITKFMKHEPSHIYIEFAREEQEKVRKESKIAKLQKIYENLNLQTKEDQQVYESLKKEDAKKRMETDALYLYYLQMGKSMYSGKPLDIDKLSTYQIDHILPQSLIKDDSFDNRVLVLPEENQWKLDSETVPFEIRNKMIGFWQMLHENGLMSNKKFFSLIRTDFSDKDKERFINRQLVETRQIIKNVAVIINDHYTNTNIVTVRAELSHQFRERYKIYKNRDINDFHHAHDAYIACIVGQFMHQNFEHLDAKIIYGQYKKNYKKDVKHHNNYGFILNSMNHLQSDIDTGEVMWDPAKIGKIKSCFYYKDVYVTKKLEQNSGTLFNVTVLPNDAHSEKGITAATVPLNKYRADVHKYGGFGNVQSIIVAIEGKKKKGKKLIDVRKLTSIPLHLKNAPVEEQLSYIASPEHEDLIDVRIVKEILKNQLIEIDGGLYYVTSPTEYVTARQLSLNEQSCKLISEIYAAMLKKRYEYLDEEEIFDLYLQLLQKMDTLYPAYKGIAKRFFDRAEDFKNIDVVEKCDVIKQILIIMHAGPMNGNIMYDDFKFTNRIGRFTHKNIDLNKTTFISTSVTGLFSKKYKL

SEQ ID NO: 1003 - protein, 1357 aa, Lachnospiraceae bacterium
MKKVGEYYLGLDIGTDSVGYATTDQRYNLLKYKGKPMWGSHLFDAANQCADRRGFRTARRRLDRRQQRVQLVDEIFAPEVSKVDPKFYTRRKASALYGKDRPDLTDANSCFNDKGYTDKEYHEEYPTIHHLIVDLMKNTEKKFDIRLINIAVDWLVAHRGHFLSDVGTNNIDRVLEFDSIYEEFISYFDGEGFERPWDSVDAGKFGEVLKEKGVNRKKLALKDLLYGGTIPSDEDYFIDRKELVNFLAGGKVHCNKLFRGYESEDDITMTISDDMEILLPQLGDYATIVGKMAAMYDWSVLSDILSSHAFISEAKVKVYEQHGEDLRRLKAFVKEYYPRKKYNEIFRESGKDCTNYTAYSYNLKSVGNGAELPKGKATREDFLKYLKQALDLDKITCRTEEDQQFVDELKERIAEGSFLPKQVNSDNRVIPYQLYYAELQKILDNASRHYDFLNAKDGDGYVAKEKLLSVFKFKIPYYVGPLKKEDDSPYAWIVKKADGPVRPWNFEEKVDLDKSESAFIDRMTNSCSYIPGENVLPKNSLLYTKYMVLNEINNIKVNGVAITVEAKQEIYEEVFCKNRKVTPKMIKGRLVTSGCIQKEDEISGIDVQVNASMKSRYDFRKLLSEKKLTEDDVEGIIARSTYTEDRYRYKKWLKENYPQFDEKELRDVAKLRYTDFGRLSRYFLSGLQGASKETGEVGTIMHFLWNTNENLMQLLSDRYTFVDEIEKLRNAYYAEHKMGINEQMENLGISNAVKRPVTRTLAVVDDVVSTIGHAPAKIFVEMARGEDEKKQRSVTRKDQILNYYRDVEEDTRLLEKQLEDMGDTANNRLQSDALFLYYMQLGKCMYSGEPIDLALIKTDKYNIDHIYPQSLVKDDSILNNRVLVLSKINGDKKDVYPIDKDIRVKMQPFWKHLCDAKLITKEKYDRLTRGSNFTDEEKMGFINRQLVETRQSMKAVTQILHNLYPESEIIYVKARLASDFKKVFDLAPKSRIINDLHHAKDAYLNVVAGNVYHEKFTKRWFKITDEYSMKTKVIFSKDLVRNGKTIWDHEHDLQTVRKSYAWNDIHLTRYAYCQKGGLFDQMPVKKGKGQVSLKDGMNIDMYGGYNKPTASFFTIAKYLKGGKKEVSFVPVDLMAGERFLKDEEFAREYVKKTLQEINTKKIDNVEFPCKNRVVRIKSTLLIDNVRVWVNGKSNGGKIILLTSAESAYFDRETTIYIGKIEKYAEKKKLNRNLRHDEQYDGLSCKNNIRLYNMIVDKLRKPPFSDMPGNQAQTLEDGKFLFEKCEFDIQIQTLLNCLNLLKSGRAGGCDLKAVGGKNSSGAMTLGANVSSGKYKRISIVNYSPAGLHVSTSDNILEM

SEQ ID NO: 1004 - protein, 1050 aa, Haemophilus sputorum
MKILGFDIGIASIGWAFVENGELKDCGVRIFTKAENPKTGDSLAMPRREARSVRRRLARRKGRLETLKRLLAKEWDLCYEDYIAADGELPKAFMGKNLNNPYVLRYEALQRLLSKEELVRVVLHIAKHRGYGNKNAKITKSEESKREQGKILSALATNASAIARYRTVGEYFYKEFCEVIKNPQGLSTNEHYTQSKVRVLKPIRNKGGEYTNCILQEDLQRELRCIFEYQKGFGFPITQEFQDKILKIAFYQRPLKDFSHLVGKCTFYPDEFRALKCSLSAVEFITLSKTINVLTYISKESGEVYSKGQYEQMLDSVFKAVCEKGSLSFAQLRKILHIDERIRFKEVDYMARKSKNTSGDSTHKQKTSNPETKKFIEHKNLKKFCEILSEIAEDRALADSIARDMTLIKDEEKLAQKLHGYGKFSQEQITQLSALNFSHHINLSLKALSEILPFMREGMRYDEACKLAGLKARHNDKKSKFLPPFCESIYADELTNPVVHRAIAEYRKILNALIAKYGSVHKIHIELTRDVGKNFQEREKYKKEIESNYKARVQAMQECEKLGLTLSEGNILKLRLFREQNEICVYSGRKITLANLKEQGALEIDHILPYSRSSDDSYMNKVLVFTNENQNKGNKTPYEAFGGDSQKWGEIESLALRSGYPKKKAKRILDKGFGDREAGFKSRNIVDSGYIARLIANYTKEYLKFLPLDSHENTALIAGEKDSKIHVEAVKGMLTATMRHFWGLGSKNRYEHTHHAVDAIIIAYINAAMIQRFSQFRQNQESLKARFYAKELAKEEFKTQRAFFEPFRGFREQVLAKVGQIFVSRPPRKRARGALHEETFYSIDDKKLSETYGGKEGVQRALSLGKIRQIGTKIVANGPMVRVDIFKHKQSRRFYAVPIYTMDFALGILPNKAVVSGKDTKSKVIKDWLEMDSCYEFCFSLFKDDLIEVQKSDMEKPELAYFVSLDASDGRIKVRHHCNDITKINENQKKLFSEAIEKEVVGRGSIQNLKVFKKYKVSPLGEIKEAKYEPRQPIALKTSPKKHRKQNNAQ

SEQ ID NO: 1005 - protein, 1174 aa, Lactobacillus mali
MGKYSIGLDIGISSVGWSIIDIEKKKIVDLGSRIFPSGNAAANQDRRGYRGTRRLIRRRKNRLADVINFLGEENFIDTKVVDQNGNIHYKLLVNSTESPYKLRVKGLSKMLTKQELVIALYHIVKHRGISYDLGDLEDDGTSGVTDYKTSININRQLLIKKTVGQIQLERLKEFGKVRGHVKKDENITLLNVFPSSAYVKEATQILTKQREFYPEITDDFITKFIPFISRKRDYFVGPGNEKSRTDYGIYKKDGRTLDNLFDELIGIDKISGEKRASASSVTAQIYNMLNDLNNLTVTNTEDGKLTTQTKREIIEADKTTNGLFGITQICKIIGCKKDDIKGFRIDKVEKPIMHTLSGYRRFRKELAKINIEANDLDINLVNKIADILTLNTEKAEIRKQLNKSNIDVSNEIKELIINKNKDFLVDGRATWHSFSYKTLNLLIPELMNTSEEQITILTRLGLVKSNSEKYKGLKNIPARRITEGIYNPVVAKATREAVNVFNAIAKKIGRDNISDVVIELPREDNEADIKKGIVKRQKQNELEKEAADALVKQQMTISDSALVAHYRKVRGLSQKVRYWYQQGTCCPYCGKNIEAVQLINNNDSFEVDHIIPISVSFDDSQNNKVLVHSQCNQAKGKQTPLGWLNNGGGFGQNKTEYVAKVKTNKNYSKNKMDNLLNDMDLSDIVTQRGFIQRNLNDTRYASRIVLDEFYSFFKSNNLSTKVKIVRGKWTSQMRKKWNGVGGLKKTRDTYHHHAIDASIIASFPLLKVFDKAIKLIDIDRETGEILQDKEAIKMSQEAKLLEKIPVIQNEKFEELINELYDFPLFKQVELANDITNPENPVKFSHHVDKKANRSVANQTIYGTRIKEKEINKRGKVEKVQERYILGTIKNIYDIDSFTSFKKIYDKMSKTGDVKFLMQKKDPKTWGKLVEILNSYPDSEEITQVDGKVKRVKVSPFELYRRENDFITKYAKHNDGPKIVSIKYYDSKIGSHIDITPINAKNKVVLQSLKPWRTDVYFNSETRQYELLGLKYSDLKFTNGVYGITSEAYEKLKHGISEDGTKTWKPIGKNSGFRFSLYRNNRVKIVDEKGESLELLFASRTTSNEGYVELKPIYKSKFDSKEDVGFYGQMTPSGQFVKKMARVGYKLYKVNTDVLGNPYYITKESDDPELSLYKK

SEQ ID NO: 1006 - protein, 1378 aa, Pediococcus inopinatus
MKNKDYSIGLDIGTSSIGFAVVDENNHVMRVKGKNAIGVRLFDEGKPAADRRAFRTTRRRLSRRRWRLKLLREIFDSYITPVDEAFFIRLKESNLSPKDSKKQYSGDILFNDRSDKDFYTKYPTIYHLRNALMTEHQRFDIREIYLAIHHIVKFRGHFLNATPANNFQVGKLDLDQKFEDLNDIYQRVFPDDSIEFRIDNLEQIKAVLLDSKRSRSDRQRSLVDDVYQTSEDKEVEKQNKAVATEVLKAILGNKAKLNIIANVEVDKEAAKEWTITFDSESIDDDLAKIDGQMTDDGRAIVEILRSLYSGITLSAIVPENHTLSQAMVAKYDLHKKHLTLLKKLINSMTDTKKAKNLRAAYDGYVDGVKGKVLTQDEFYKQIQSNLDESVEASEIQTYIDQDIFMPKQRTKANGSIPHQLQQQELDQIIENQKEYYPWLAELNPNPDKKRQQLAKYKLDELVTFRVPYYVGPMITAEAQKKQSGAEFAWMIRKESGNITPWNFDQKVDRMATANQFIKRMTTTDTYLLGEDVLPSQSLLYQRFEVLNELNKIRIDRKPISVELKQQIFNDLFKKFKNVTIKHLQDYLVAQGQYSKRPLIEGLADEKRFNSGLSTYNDFCGIFGAKLVDENDRQADLEKIIEWSTIFEDKKIYRAKLNDLAWLTDEQKDKLATKRYQGWGRLSSKLLIGLQNSEHRNIMDLLWIGNENFMQIQADSDFAKLIKDANQNALQNNDSQDVINDLYTSPQNKKAIRQILLVVHDIQNAMHGQAPTKIHVEFAKGEERNPRRSVQRQRQVEAAYEKASNELVGANVREELKDAITNKRDFKDRLFLYFMQGGVDMYSGEPINIDNLSRYDIDHILPQAFVKDDSLNNRVLTDAEKNRRKSDAVPNELFGAKMRVTWERMKEQGLISKGKYRNLTMNPENINKYTENGFINRQLVETRQVIKLAVNILADEYKENTQIISVKADLSHQMREDFELLKNRDVNDYHHAFDAYLAAFMGNYLLKRYPKLRSYFVYGDFKKFTQKEIKLRRFNFIYDLKHEDQVIDKETGEILWNKNEDIAYIRHLFAYKKILISHEVSERRGALYNQTVYKASDDKASGQGSKKLIPIKSDKPTEIYGGYTGRTLAYMTIVKVTKGKKISYKVVGVPTAVLAKMAGVRQGSQEEQDKLYGVLKPQFTHQKENKKTGEITETVDKFDIIVPKVKYQQLVNDNGQLFMIGSDTLPYNAEQLVLSKESVQTINNPGIKDEGSDEESENKKLDNVYDEIVLCMNKYFPLYDNRGFRNSITNGKNKFLKLPIKNIYKNGKLINVGKREVINRILQGLHANASVTDLSNLGIKSPFGFLQKGAGLSLSGEAQLIHQSATGLFEHRVQLNKIK

SEQ ID NO: 1007 - protein, 1357 aa, Pediococcus acidilactici
MGDRKYNLGLDIGTSSIGFAAVDENNQPIRVKGKTAIGVRLFEEGKTAADRRGFRTTRRRLSRRRWRINLLNGIFDAHLAEVDPTFLARLKESNRSNLDPKKSFQGSLLFPERKDYQFYKEYPTIYHLRKALMEKDRKFDIREIYLAVHHIIKYRGNFLNGTPMRSFKVENIELDTLFDRLNQLYEEIIPDNELAFDLEQVADVKEVLSSTTIYKMDKKKQLVKMMLLPASNKALQSENKKIVTQFVNAILNYKFKLDVLLQVETDADWSLKLNDEGADDKLEEFTGDLDENRLEIIDLLQRLHNWFSLNEITKDGNSLSAAMVEKYKDHRHHLELLKKVIEDHSDAKKAKALKETYTAYVGKTDDKTQNKDDFYKAVEKNLDDSPEAKEIKRLIQLDQFMPKQRTGQNGAIPHQLHQQELDQIIEKQSKYYPFLAEPNPNVKRRKDAPYKLDELIAFKIPYYVGPLVTPEEQAQNKENVFAWMKRKAAGPITPWNFDEKVDRMESANRFIRRMTTKDTYLFGEDVLPAESMIYEKFVVLNELNNLKINGRHLSLKDKQDIYNDLFKQQKTVSIKALQNYYVTKKKAATAPTVGGLADPKKFLSSLSTYIDFKNMFGERVNDPQFQEDLEQIVEWSTIFEDRGIFKAKLQALGWLSEKQIQQLVAKRYKGWGRLSKKLLTGLKNAEGYSILDEMWHSTENFMQIQTRPEFAALIQQANEKQFEGNDPDNVWENIENILGDAYTSPQNKKAIRQVVKVVQDIEKAVGNPPEKIAIEFTREAAANPQRTQSRLRTLEKLYESAEEVVDAGLTAELAEFKENKHVLSDKYYLYFTQLGRDVYTGDTISLDRLNDYDVDHILPQSFIKDDSLDNRVLTIRAVNNGKSDNVPAKMFGKKMGSFWRYLLDNGMISKRKYNNLITDPDNISKYAQKGFINRQLVETSQVIKLTANILNGIYDKDTEIIEVPAKMNSQMRKMFDLVKVREVNDYHHAFDAYLTIFIGNYLYKCYPKLRPYFVYDNFKKFGNKEDIGHKRFNFLGKIERDKKVVAPETGEILWSNVAPNETIKQIKKVYDYKFMLTSHETYTKHGALFNQTIYSAKASKTMIPIKNDRPTKLYGGYSGNEDAYMSIIRLSDKKKTYKVVGISMRDASKLKAYENNAHEEYLKKLKEVIEQQFLDSGKKTKADFEIVIPKVNYHQRMQDGTKQFRIGSSKYVHNTKQLVLSEKTLKAIRNNKQYNGDAEKDLINAFDEILTIVNDSFSIFDIRSFRKKLNESRDKFVSLPVEDTKEKSKVIKGKRETLKQILIALHANGTSQDIPQLGLKSFGKMVKTGGLTLSENTALIHQSPSGLFEHKIKLSDL

SEQ ID NO: 1008 - protein, 1375 aa, Pediococcus parvulus
MENKKYSIGLDIGTSSIGFAVVDENNRVMRVKGKNAIGVRLFSEGQPAADRRSFRTTRRRLSRRRWRLRLLREIFEPYINPVDEAFFMRLKESNLSPKDANKHYSGDILFNDQSDQKFYEKYPTIYHLRHALMTEHRKFDVREIYLAIHHIVKFRGHFLNAASASNFTVGKLNLEGKFDALNEIYQRVLTDDPFALRTDNLDHIKEILIDNKRSKADRQRTLTGDVYQSSEEKEIEKRNKAIATEILKAAVGNKAKLNVITNVEVDKEAAKDWSLTFDSETIDDELAKVDGQMTDDGREIIEILRSLYSGITLAAIVPENHTLSQSMVEKYNSHKAHLKLLKDLINNMTDTRKAKNLRAAYDGYIDGVKGKVLTRDDFYKQIQGNLDDSAEAQKIQDVMDQDEFMPKQRTKANGSIPHQLQQQELDQIVENQKEYYPWLAEENPNETRRGVAKYKLDELVTFRVPYYVGPMITAEDQEKQSGASFAWMKRKEPGNITPWNFDQKVDRMASANQFIKRMTTTDTYLLGEDVLPAQSLLYQRFEVLNELNKIRIDRKPISIELKQQIFNDLFKKFKNVTIKHLQEYLVATGGYDKRPRIDGLADEKRFNSGLSAYHDLHGILGAEVVDANDKQDDLEKIIEWSTIFEDKKIYRAKLDELTWLTDSQKEKLATKRYQGWGRLSKKLLSGLRNSDHRSILDILWITNENFMQIQADPDFAELVKNANQGMLGKNNSQDVINDLYTSPQNKKAIRQILLVVHDIQNAMHGQAPAKIHVEFARGEERNPRRSIQRQHQIEAAYDKVTSDLLVDAGVRQELKDAINDKRDFKDRLFLYFMQGGRDIYNGEPINIDRLSSYDIDHILPQAFVKDDSLNNRVLTDAEGNRRKSDAVPSELFGAKMRSTWELMREQGLISKAKYRNLTMNPENINAHTENGFINRQLVETRQVIKLAVNILADEYTEDTQIVSVKADLSHQMREDFELLKNRDVNDYHHAFDAYLAAFIGNYLLERYPKLQSYFVYGDFKKFSQKDTKMRRFNFIYDLKHSDQIADKNGKKIWHKTNDLDYIRHLFAYKKILISHEVSERRGALYNQTVYKASDDKASGQGSKKLIPIKANKPTEIYGGYTGKTLAYMAIVKVIKGKKIAYKVVGVPTSALVQLAGIEHGSQEELNRLYDVLKPQFTQLKKNNKTGEISETVSKFEIVIPRVKYQQLVEDDDKLFMIGSDTYPYNAQQLVLSEGALKVINNVYRKGENSDKQESYKLDDVYDEIIIAMKKYFPLYDNRGFREKVAEGKSTFENLPISNEFKNGKLTKIGKKEVINRMLQGLHANATMTDLKILGIKSPFGFMQQPTGIALSENAQLIYQSPTDLFERRVQLNKIK

SEQ ID NO: 1009 - protein, 1370 aa, Weissella kandleri
MEKNKEYVIGLDIGTGSVGWSAISTDNYQLIRQKGKNLIGVRLFNSAETAEERRGYRTTRRRLSRRRWRMSLLNDIFRPELNEIDENFLARLKYSWVSPLDQKNPQLNEQGTNASLYGDIEADQAFHRAYPTIYHLRKTLMEDNQKHDLREVYLAIHHIVKYRGHFLTPDFDANSQTIDIKGLFKQLGDVSGSIELQADQTSTVIAAFQSILLDFTKTPTESGRLAGQLFSDQNKDKQAKKQVEELFKLLRGGKGSLADMFLLTDLDKVVKNQLKFAFDDAVDENLNLISNLINEEQYELLLNIQKLRGTIILKQILGDDETVSDAKVRSYEEHAHQLKELKAQVLTKDNKEKFEEAYQLIQKGDASRIDGLKKLKTIINQEHEALRLDKYEADKLLKLIELDQLLPVQRSKRNGEIPHQLHEFELKKIIEKQGRYYPFLRETFERDGQEFNKIGQLVNFRIPYYVGPLVDPRLAGIQSGDQTNHWMTQKKAGKITPWNYTELIDIDKSAAEFIKRMTGTDTYLVGEPSLHKASLIYQDYNVLQELNNLRYDGKPLPVDAKQEIYSNLQVSLKNATKNKINSFLISEGYLQDGEELTGFAGKELKNKLSSFHYFKNIFGPERMNTLGTDNLEKITELQTVFEDRHMLKRQLQKLGFLDDDECEKLAGKHFTGWGNLSKKLLNTPAIIDPEINENKISLIDALYKGQRNLSFYVNNMDDKYQFRDWIESENQSQQVEISLDEKIKNLAGSPAIKRGITQSMAVIQDIIRANNGISPKRIYLEFARESQNSYQPNSRIKQIEKIYDQNKKELMKVYPDVFKDVQGVLNNVDENNSLSEKAFLYFMQLGKDMYTGEALDFDKLYTYDIDHIIPQAMTKDNSWDNKVLVTAIKNREKSNQVLDNAIQAKMHNFWLQLKKVNLLSQRKYDTLMKTNFSKGDEKKFIARSLVETRQIIKNVAELIKSEFDHVEAIPIRQELTSDMRQLMDYKKNRLVNDYHHAHDALLIATVGEFMQKRGFMQGMNPSQNVYHGYTQYVKKWLSMAKKARSAEKPERIFPLQFVVGSMRMAVRDGQVDKVTHPATGEICWTADNEAYLRKVLGYKNILVTRKVKNAGKLYQRVTVKPKGSGEAPVNHQKSDINIYGGVTSEQAAELVLIRIKAKNNAKNMVIKIPTAIANQVANKTTTYDAYVRSLNIPNYAGIILDQIPLGQLVFDERTSFYLASAEIKHNARQLWVNQHINNVLTKKNINDEERDNILNLLTNEKNLERFKLLEPDLKRVKAAKQQWASCDDQEQMQILRIIINKMHDDASPQIPGKIDPFKNYLDKQGKGWRDLRTKKGMKLSDNAEFVYQSPTGLYHRKISINELLKQKQLE

SEQ ID NO: 1010 - protein, 1379 aa, Pediococcus stilesii
MRIDNGLEELKVNNRIYNIGLDIGTSSVGFAVTDAQDKLVRVKGKTAIGVRLFEEGHTAAERRGFRTTRRRLSRRKWRINLLNQIFEPYISEIDPTFFARLKNSSLAGKDKKFEGSLLFPDRTDYQFYKDNPTMYHLRKHLMEKDRQFDLREIYLAMHHIIKYRGNFLNTTPMNHFKNEEIDFSALFSRLNELYQEIDDENIFELNIENVDEIKKILLNHDLFKMEKQKQVAKLLNVDTDDKQLKKENTALASNFSKAILGYKFNLALVTKIPDQDKKEWTISLGDEDFDDRLDNVPVALTESQLEVVEVLHSIFNSISLNEIVENGETLSSAMVRKYNDHKHDLKLLKNVMTTLEDRKKAKKIQGIYNVFVGKDTDLISDKDKNKYKDKDEFYKEIQKNLDNSSDAEEIIKRIKQDQFLPKQRTSKNGVIPHQLHQRELDLIIENQAKYYPFLKEANPNKKRLKQAKYKLDELIAFKIPYYIGPTSGAENSDFSWLKRKKDGQITPWNFDEKVDRIESANRFIRRMTTKDTYLLAEDVLPLESLIYEKYSVLNELNNVRINRQKLSVNDKQDIYNELFKNSKTVTLKQLQKYFEVTKKLKTVVVEGLADPKKFLSNLGTYHDFKLIFGDIVDDPEYQTDLENIIEWSTIFEDRGIFNSKLNEITWLTDEQRKKVLSKRYQGWGRFSKKLLVGLKNSQGNSILDELWNTNLNFMQLQSQDDFAELIHAENAKQFKANDPDNPWNGIDAILNDAYTSPQNKKAIRQVVKVVQDIEKAMGNKPQKIAIEFTRSADKNPRRTDSRIKRLSDIYKEAAEKVVGESLKLELNEYLTSKKKMTDKMYLYFTQLGTDIYTGKKIDIDQLNNYDIDHVLPQSFLKDDSLDNRVLTNRSDNSEKSDTVPLHKFGAKMGNFWRQLADEGLITKRKYKNLTTDPATIDKYTIQGFIRRQLVETSQVIKLTANILGGLYPEETEILEIPAKLNHQFRDMFDLVKVREVNDYHHAFDAYITVFVGNFLYRRYPKLRSYFVYGDFKKLNKTDDDIRKFNFLNLFNKDKVEDNETDEILWSKAESIRDIKNIYNYKFMLVSREVYTRHGAMFNQTIYPASKNDSKKLIPIKKGKDTAIYGGYSGNTDAYMAIVAVEDKKGEKFKVVGVPTRAVSRLEQLAADDHDQYLTALHDVLKPNFTKIKTNRKTKAKEEVTTPFRILVGKVGYRQLIQDGQVKMMLGSSAYKYNAKQLVLSEKSLKVIKNNKKYNPDDENQDLIDVYDEILGVVNRAFNLYDTNGFRKKLNDNRVKFVELPINNIFDGTKLVQMGKRAVLTQILNGLHANAALGDLKALGISTPFGKMQSKSGIPLSMDASLVYQSPTGLFERKLNLSDL

SEQ ID NO: 1011 - protein, 1395 aa, Lactobacillus ceti; identical to SEQ ID NO: 165

SEQ ID NO: 1012 - protein, 1346 aa, Lactobacillus saniviri
MVEHYAIGFDIGTGSTGFAGVDPNGKLVRMRGKNVYGVYRFKGGEAAADRRGFRTTRRRIKRRKWRLRFLKSFFEPYIAPIDPEFFLRQKYSADSPLDPKGIRADKGLLSDMSDQEFHAKYPTIYHLRYQLMHEKRQFDVREIYLAMHHIIKYRGHFLIEDGADNFDAKQIDFFDQFQRMAAVTAGLPELETLVVPDETQSDAFKRVLFDESQTKSDRQKVLASQLLDIQDNQSKAIKDFIAALTKAVVGMKANLATLTSTAIESTDKNDWTKPLGQLDDFLLKHEEDLDEDGYALIDAANQMYSAAVLAALVPEGMGFSEAMMARYAQHKKQLALYKQVIASLPDKTQRHELKDAYADYIEHAAQNPRDAFYKRVTKVLEGVDSADARTVMTAISHDEFLLKQRTLSNGKIPYQMQQHEFDAIIENQKAYYPWLATPNPVEADAKRLPYYLDELIGFRVPYYVGPMVTEKQSQFAWMIRKADGELTPWNFFDVVDREKTANRFIQRMQTTDKYILGEDVLPKHSILYQQFEVLNELNNIRVEKHPLTTEQKQFIYQRLFVDQQRKTITKKNLQDTLVAMGEFDKAPDIGGLAKEDVMMSSLATFADYSKILPEAISDPTRQNDIEDIIAWSTIFEDTQIFFDKLKTVDWLTTQQRKRLASIRYTGWGKLSKRLLQQIPTSKHTNVMAALWATSDNFMQILQDEQFQEGLYDANRLPEETLTPDEQVEKILDEAYLSPADKKGARKVIKVMNDIVRANHGVLPEQVFLESADDPQKNKRRSVSRSKQLEEKYRQAAQSFIDEAVKEELNAQIVNSAEFNDRLVLYFTQNGRDMYTGKRLDIENLGSYQIDHILPQSLVKDDSLDNRALTARDINAEMSNQFVSERFGLGPRAFWQQLKNNGLISGRKFRNLVMQRDEIDKYAPGFINRQLVETRQIIKTVEQIIHRLWPDIQIVTIKANLTHQVRSELGFPKVRELNDYHHAFDALLAARIGQYLLEHYAGLKPFFTYGEFKRGDTKKYGTTNFLRRLTKDNKDKKGELLPEVSDWIDSIDSIYNYKKIPVVWENTTNMSALFDQTIYPRPDRDTTKRKLIPTKLDKPTDIYGGYSSAKTAYMAVMRVQTKKGTEYPVFNIPVSIASQLNRITDQTMLKQQVKQFIINAEQSASKKKLYESGDVILSRVALGQRFTDKNYGEVFLISNMEVQNPQSLWLGRASQQRLTREPEGNEKPETSLADIYQQILKQVDRYFLAFNIRQQRQKLLGTLDQFTSLPVGRVNEQTRTDQNQRSIIARVMIVLGKGSREEKFPEFGLSALGRLVRTGGITLSEDAQIIYQSPTGLFERRVALKDL

SEQ ID NO: 1013 - protein, 1361 aa, Sulfurospirillum sp.
MTSLISLDLGGKNTGFFSFTAKDVSIIDTFQSGTIIYDESFVLSQVARRGKRHGKRNNLRNTLVKRLFLLLLQKHYGLSLDFLPDEILGLFNKRGYTYASFEIKEDEKENLESDILKEFLNDKLNYTIQNDDEVEEFLNQIASNEETFKNYKKDFENLFGASTHQPKKQIELIDEIKKDLEKEDAKELLDGLKVIKKIIDEFHKQQNQGNLPRAKYFEELYLEIEYNLKIQKFFTCNHLHINDMQYLIGNLSNYQLKELRRYFNDEAMAKEDFWSCEKLHRITWRFIQSWHPKSPEDKQRQKENLANLKTKSIIEFLTTTNPLMTIPPYDDMNNRGAVKCQTLRLNEEYLDKHLPHWRAIAHTLASETQKENLEGVTVKGYSEDSTLLHRILDTSSIIDPYRLRSDEIDSYCDVLTKDNAFALKKFAKEYYQLVKEKVRTGIWTKDDDMFKKCDHNPPHKNNQIHNLVAGILGKPIAKERFEAFENELWNVKFGNKKLSSYCKNIEEFRKSNGNLFKQIVELGEDKEVQKYQKELNEWVRKIGEFFNIETPYRARFNNLFSMAQLHTIIDTTRSGFNATCKWCSCENQYRASTRIEIDEQTGEITTNANCQRLPADTQRPFSGKIERYIDKLGYEIAKVKAKELEGIKEDTIDLKIILEQNAFAYEESIRNAKIKNANAKAKKALEEAQKRGLKNIEDKTKRIKDFSNSICPYCGQSLGEDGEIDHILSRSYTLKKYDTVFNSEGNLLYVHQKCNQAKLAKTDYSLQDLKIDISQKWIEEQIATIKTYKTFSVLTQEQQKAFKYALFLDNSNEAYQKVISWLRTDQSSRVNGTQKYLAKKIQEKLKAMFPAKTFNFEFILADANDVHDLRIKAYQLPEKPKDSKQETYSHTIDAVMSLVSVWDKVLPKTEKPTKEDILKFANVENWSALNNEFLTKGKSANQKIEEMIQANDFGQKNMRQVFSKPIFKDESIGERYKPFVRYHNQFYIGYPISIKDGYDMQHCQAMISKNDISRVEEILKDTSLCTLLKEKNGIKLYSINKQSINELSNQFFNLNYQNLNDAQKKKSELAEFVINHCKYYVKKTSVINAPQFIDKDSMKPYPFYKDWQKFHEAYKKELDAEPKTKKDNGKLVYDISGIDDFWTEFCKKYFGIKTKDNRNKARKVFSIVALTSAPGTVFRIKRKTPKGHIYQATAIDNQQISGDYANVLLAGNSKTLALAGQKPSSDLKKELSVKESKDIRDIKLEPSRFFKEGFDCRGIEVIVNKTSATIKNFPLTKIDKKIKKLIFKTLFEKKDGKRQKQKTSISLKEKNTMQETLKKLLKDSIKVTIRDGSISGIEISKKTVNFTLPFKSENLAKLLDD

SEQ ID NO: 1014 - protein, 1347 aa, Lachnospiraceae bacterium
MGDKKNHSRKEFEDYYLGLDIGTDSVGWCVTDKDYNVLKFNGKAMWGVRLFAKAATAAKRRSFRTARRRLQRRRNRVLLVEELLSEEVAKVDPLFFTRLKESKFYLEDKDEKVRQPYCLFADQNYTDVQYHKDYRTIYHLRNALMEHDRNYDIRLYYLAISNFMKHRGHFFFNGDISEVTLFEAVFDSLKEYLVNEFEVSLETDDIEEVKNVLLDKKIGRADKKRKLIDLFDAKKSQIKSEILGAICGLNVSLDKLFDDESLKDAGIDKISFYDGIDDEKNDELLEVLSDRFEMMIRLKAVYDWSVLANILADSTSISKAQIKVYEKHKKDLQDLKYVVKKYVPNEYDEIFKDSGVKENYTSYVAHVFEKGNTLTEKRITEQSDFCKYIKKKLEKVDAEDEVLARIKTEVKNYIFMPKQISKNNSVIPYQVHLQELKKIVDNMGIDYPLLKEKDTDGLSVCDKILKIFEFRIPYYVGPLNDYHSENGGNSWVIRKESGRVLPWNFDSKVDIKASARAFMSNLTNKCTYLLDEDVLPKDSLLYSKYMLLNELNNIRINGDRLDVDVKQRIYNEIFKTRSGKFSLKKLTDWLVKENIASREDKVSGIDKVFQTTLKSYQDFYRILGSRVETEPQFIDKLIENILIFGNDKRMLKELLTDEYSDRLSTEEIESISKLKYSGWGRFSSKLLNGIEDIDKETGEIKTIINFMWNGNENFMELMSSKHGFAEKIRQQNDEFKGNSAEISYDLVYDSYASPAVKRGIWQTLLIVKEIMKVKGKSPKRIFVEVAREKEKNPKRKETRKERLLAPYKSIECERRNWYDEINKRKDWEFDDTKLYLYYTQLGRDMYSDEEIPLEELFTGKYSKEHIYPQSKTKDDSIINNLVLVRTDYNNERQDKMPIPEKFRQPQLWTRLKKLNLISEEKYKRLMRKEDFSDEELTGFIARQLVETRQSTKIVAQILEQTLPETKVVYSKAINVSDFRYMDKKYKLVKTRSINDFHHAKDAYLSIVVGNVYYTKFTDNPKNFIAGKKEYNLKKLFDHDVTRNGEIAWKQGEEGTIATVRKYMAKNNILFTRYATENRGKLFEQPSKKNSKNLTPLKLSDSRMNVKKYGGYSGLGYQYFSVVEHEKNMKNKKAVRALVAVPEYLGDSHEAFIEYCERVLKFNSPRVVYEKIKIDSFLKIDGYPVHLACNKDLTRFVAKNAVQLCLNRESEAVIHNIEKVIKKKDENKDYKITSYDKISEEEVISIYDILLDKLKNGIFSNMKGVSADKIEVAREKFMLLSIDDKCEVIRQLLFVFKCDRKNANLAVIGIGGDIGEIRYNKNLSDYKSFKLVSQSVTGLFENEIDLLK

SEQ ID NO: 1015 - protein, 1108 aa, Carnobacterium funditum
MIFRRDRMGYRIGLDIGIASIGYSILKTDENGNPKKIEFLNSVIFPIAENPKDGSSLAAPRREKRGLRRRNRRKNFRKYRTKRLFIESELLTEKGIRTIFENIADKSIYQLRSEALDKLLTNEELFRVFYFFSGHRGFKSNRKAELKDSDNGPVLTAISETKKALHTTGYRTLGEYYYKDSKFDEHKRNKEHEYLTTPERSLLVEEIKEIISKQRGYGNEKLTEKFEEAFIGNQSDKGIFNQQRDFDEGPGENSPYAGDQIEKMIGWCTFEKEEKRAPKASYTFQYFDLLSTVNNLRIQEYAGESYRNLIVEERQLLIDKAFEKEKITYKDVKKLLNLDEYAKFNLLNYGSKIEAEATEKKTTFVSLKAYHKLKKTVGKEVFSEMSPVVIDEFAYILTAFSSDNSRMREFKNRLDLSNELVETLLSITFSKFGNLSIKAMKKVIPYLELGDTYDKACGEAGYDFRQNHINEEYIKENVANPVVKRAVSKTIKVVKQIISKYGPPDAINIELARELGKSNEERNKIKKRQDENRSYNEKVASQISELGFAVNGESIIRLKLWFEQKNLDPYTGLSIPLDDVFSYKYDVDHIIPYSKSFDDQFTNKVLTSTACNREKGNRIPMEYLGNNPIRVKSLEAVANQIKNIKKREKLLKQTFSKEDTDGFKERNLKDTQYISKLLKSYFEQNIIFSESLEQKQKVFVGNGVVTARLRARWGLNKVRDDGDKHHAMDATVVACMTPTLIRMLTLYSRRQEVRANLDLWQTYDEKEDPDFLKLSKIKREQYESLFSKRFPEPWPGFRDELLIRMSEDPKSLIKNYPTVKANYSEQEIMDLKPMFVVRLANHKITGPAHQETIRSAKLLDEGKTVSRMSVDKLKLDKNGEIKTAKWEFYQPSDNGWKIVYEAIRRELEKNDGDGTKAFPEKEFTYEFNGHSHTVRKVQVVQKTTLSVQLNDGEQVADNGSMVRIDVFKTAKKYVFVPIYVSDTIKNELPNKACVAHKPYKDWPEVDEAEFQFSLYPRDMLHIKHKTGFTAFYNGENKGPSKISDFYGYFTAADIANAQINIVSHDNSFLGKGIGIAGLEKIEKYAVDYFGNYHKVNEKVRQAFQRKKG

SEQ ID NO: 1016 - protein, 1107 aa, Carnobacterium gallinarum
MFRSGDMGYRIGLDIGITSIGYAILKTDNTGNPYKIEQMNSIIFPAAEHPKTGKSLALPRREQRGARRRNRRRKFRKYRTKMLFIKHHLLTKNQMEMIYTDSRILTDIYELRKKALDERISNEELYQILYFFAGHRGFKSNRKSELTEKDMGTMLTAIKGIEEVLRNGTYRTLGEYMYMDAKYQEHKRNKEGLDRYLGTAKRALVEDEIKQILTKQFELGNLDLTKEFEEAFIGDEEKTGIFNDQRDFEDGPGKQSPYAGNQVEKMIGDCTFEKDEKRAPKASFTFQYFDLLSKINQLRYRERIGSDYQELTSEQRELLKEKVLTTQKVTFAGVKKLLGLSPYTQFNLLNYGTKTTQEETESKTNFYSLLNYHKLKKTLPETFFKSLSVDQIDVIAYVLTVYSSDHRRRDEFYGRLALPEEIVDLLLPLNFSKFGNLSLTAMKKIIPYLETGKVYSEAAGLAGYDFRYKQIDEEYIEKNVNNPVVKRAVKQAIKLVKNIERQYGYPPDALNIELAREMGKTFADRRKVMKFQEEGRRRNEQLAERIRDLGQSVNGENITRLKLYEEQNGFDPYTGNTIPCNQIFSDVYDVDHIIPYSKTLDDSFGNKVLVSSAANKEKGNRIPMDYIGGNPERRKKLETIANSIKNPKKREKLLKEELTKEDMEGWKARNLNDTRYISKLLYDYFRQTIQFPELAVEKKKRVFAINGSVTAKLRARWGFNKVRANGDEHHALDALVVACVTDKYIQEVTKYSKRKEVRENSDLWRLDETPEAIEADVVKTKTDYNRIFNQAFPTPWVNFREETRCRMSGNPSELMKNYTWETYTDEEIADLKPIFIVRLPKMKTKGAAHEETLRSGKLYEQGLNISRVSVSRLKLDKNGVIKSGNAEFYQADGNGWKLVHEKLTEALLAHGGDGSKAFPEGFLQYTHEGKEYMVRKVRVVGKSSLQVPLNTKLAVADNGSMIRIDIFRTENGKYQFVPIYVSDKVKETLPNQASAGGKNSKDWPVVKPEDFLFSLYPNDLIRIKHKKGVKHTSKDGNKEVEIKSDFFAYYKGANISTASISGINHNNFFEFEGVGLATLISLEKYRVDYFGNYYKVNEKIRQEFHKK

SEQ ID NO: 1017 - protein, 1436 aa, Flavobacterium sp.
MAKILGLDLGTNSIGWAIVDKEGTEFSLLDKGVRIFSEGVNIEAKTNSESSKAAQRTGYRSARKLKYRRKVRKIDLLKILSDNNLCPKLSDEELSDWRYKKIYPQNDEFRKWLSTDNQDNEQERKEQKYNPYYFRFISVRNSLNLNNKEDRYNIGRAFYHIAQRRGFLSNRLDSSDNSIIEEKKFDITSLINESHSIVEFSEIFSDFLSSFDKDEAIDKPLFTLSRAFNAIIKDNSKSVYDDLKEKLIERLNKKEFLGPVKRAISDLSEKIENSGCSTLGEYFYTLYEKGGKIRGEYTHREDHYLKEFETICKTQNISNELKDKIEKAIFFQRPLKSQKGLVAKCPLENRKACVPISHPDYEEFRLYSYLNNIKIKTPNDDKLRVLNADEREQIDFLFYRKSKANFDFLEIAKKLTPKNLKSGYYKDKNSKEYDILFNYNLGSNVAGCPTIANLREVFGKDWKEYLYSNFLKNTKTEKNKIVQKTVEDIIDDVWHILFRFDKEELLKQFAIDNLSCDDKTAIKFSKIKLKQEYGSLSLKAIRNILPYLKQNLIYSHSVFLANMKNILPAEIWNNEENKRVINNEINSILENYKVYSNNIEIVNGLIKNIKKENGTWSSDNKFVAEVYKKDLEKQVKDFFGTKKWNETPIEYQTAILTECFELFSSQMQLKSGRAEFAKKKTIDEILKQFLNDNFNVDAEGLKKLYHPSAIEVYKKAKRSEEDGKLYLGSPLISSIKNPMAMRSLHQLKKVVNQLIKDDLIDEETVIHIEMPRELNSANERVSIRQWQEELKNKRNKYAEEIKSIFRGDIKMDGCNDVISIEYEPTENDILKYQLWIEQHKICLYTGKTICLSDFIGSNPKFDIEHTIPRSRSLDNSQINKTLCCSIYNREVKKDKIPFECSNHKEILLRINHWFAKYKTLEEQIKDLSKKVKVASTKERRDKYIIDRTKLRFEHSYLYKKYKSFTMEEVPEGFKNSQSVDIGIISKYGNLFLKTAFSKVYPIKGKTTANLRQMWGLDEKTRDNHAHHAKDAVVVACCTRDINDALANYYHDLEQYEFYGKPKPSFAHRIPWKGFNNDVKEFDNSILISHHTPDVLSTQSKKAIRKRGIIQRNEKGEIKYKQGDTVRGALHKESFYGAILREELDKKTGKTEEVVKYVKRQAIGLFKDTDLKNIVDDKVREIVERGREHEKQIKKEIEELKKVMKNINEEEEQQFKDAIELLENRIKNELYILPNSKGSPVPIKKIRYFTNDVSNPLLIKKHRDVSRHEHKQHYFAKNDGNYCFAIYDGKDKKGKIITEYKVVNNFEAGKYYNSNANTHKFPLEFNIEDKNKNILELKFLLKTGTLVLFYKNFKDEIWELDNLDLAKRLYKTVAIEADGRIQFRLHSTSKPDGQLEKSSIIDFEVANEKLRISKSSLTVLVEGFDFNISSTGKVIKI

SEQ ID NO: 1018 - protein, 1455 aa, Salegentibacter sp.
MKRILGLDLGTNSIGWSLIEQDFNKKEGQILGMGTRIIPMSQDILGKFDSGNSISQTAERTSYRGMRRLNERYLLRRQRLHRVLNILGFLPDHYAASIDFHNKLGQFLPGKEVKLNYILNGGSKHHFIFQNSFDEMAKDFKIKHPDLKIPYDWTLYYLRKKALKDKISKEELAWLILNFNQKRGYYQLRGEEEEIEKNQEYVSLTVKELINTGEAVKGKPLYKVIFKNGWEYDREITKIEDWEKQEREFIVTTKTNKDGSLKRTFKKVDSEQDWIAIKKKTEQNIDETNKTVGEFIYETLLKKPSQKIRGNLVKTIDRKYYKNELIKILEVQKEFHPELENKDLYKKCLNELYPRNEAHQSNIKEKDFTYLFVEDIIFYQRPLKTKKSTISNCAYEKRYFQKDGEIQEQPLKGIPKSNPFYQEFRLWQFIQNLRIYKKIALDKQKAKIDEDITNHLLPDTKSIVELFDFLNNRKEIDQNQLLKYFSDLKLIPKQKKDAPSYRWNYVEDKKYPCNTTRAEFLTRLKKLKGIQENFFDKKTENDLWHIVYSVKDKKDFEKALGTFARKKRISESKFVENFKKIAPYSNDYGAYSEKAIKKLLPLMRMGKYWNEESLKPEIKNRIEDIQERLRAINFNKDEIETVADDAYKKQVLKSFLKSENKKNPFEGLNTYQACYAVYERHSEVSEIINWQSPSDIEFYLNETFKQHQLKNPIVEQVVTETLRVVRDIWKYYGNSKADFFSEIHVELGREMKNSAEKRQRLSNQNNERENTNLRIKAVLEELQDEGVEEVKPYSPNQQEILKLYEEGVYFNAKYDQVSEDEIEAIRKKNSPTKKDILRYKLWLEQGYRSPYTGNIIPMSKLFTTDYQIEHIIPQSRFFDDSFNNKVICESAINPYPYKDNQTAYEFINNSRGCVVPELGINGKECTIFTVEEYEAHCKSYYSKNRTKLKYLLSEDIPEGFINRQLNDSRYISKFIKGLLSNILREPNEREATVKNLVPVNGAITSQLKQDWGLNDKWNEIIAPRFKRMNEITKSNDYGYWDNKINAFRTQVPKDIETGFSKKRIDHRHHALDALVIACTTKDHINYITSINTERKNHSLVKKLRKTKDIELGGKKRTVAKSYKQPWEGFTIDAKNALEEIVISFKKNIRVINRTNNKTWHWEKKNGQWKKALKFQKGNNFAIRKPLHKETVSGLIDIPTPKGKVATATRTNISDIKNHKHIDKITDKSIQKILRNHVKNYLDQNGKEDFAEAFSPKGITDLNQNIKELNSGKNHQPIYKVRQYEVGNKFSVGERGNKTDKYVEAAKGTNLFFAVYWDDKKKKRNFETIPLNEVLEHQKQMAHIPMKDKEPIPIDHTKGKFLFFLSPNDLVYIPDREDIDSDVIPENLKKEKIYKMVSSTGIQCFFIKHQVSTVIQNKVEYSALNKMEKDIEDNMIKNICWKLEIDRLGNIKKIVK

SEQ ID NO: 1019 - protein, 1123 aa, Flavobacterium daejeonense
MAKILGLDLGTNSIGWALIDDVQNKILGVGSRIFPMGVENLGDGDGEISKNASRTGTRGVRRQFFRRRLRKKVLLKALSENNMCPMITSDFDNWKKTKQFPSEKLASWFALNPYELRNKALSEKLTLEEIGRIFYHLIQRRGFLSNSRKGGTDDGAIFKGNPKEGKIGITDTQESIQDKTLGSYLFEIYPKENQPFQNGLERIRNRYTVRKMYVDEFEMIWEKQAQYYSNLNEDLKTLFGGRKLDGYKEDGILFHQRPLRSQKHLVGNCVFEPNKTKCPISAIPFEQFRVWQWVNTVEYNGKKISQVEKEKIVEFLYANDKTDFKKIRKAIGKESTEFKFNYKDDDKIVGTYTVSHLSNKKYFGKKWFEFSEKEQEDIWHILYFFDSKSNLKEYAIKNWNFTEEQAESIAKFNVKDGYSSLSRKAISNILPFLKLGFTYDVAVVLGGIKNVFGHEWEKLSDEKRNFLIDNVEGIVRSKTKGGFIDVIKDILRNDYNISDNQLRKLYHHSATIYVAELLEKLPVGKEADKEIQSIRNPIVITALFELRKLVNELIDDFGSIDEIKVEMARDLKISKSQRNKIRREQKRLERENDRVKARLLEEGQRITHDNILLYKLWEECKKTCPYTGNPIPLYKLFTGEIQIEHIHPWSRSLNDSFANKTLCYADENRKKGDKTPYEFYGNDESNWSAIKERALKLFSDTKEYPNAYQKFKRFVQHKFDDDFSSRQLNDTRYISKEAKNYLSKICKKVAVSPGQATSNLRQKWGMNNILNDENEKTREDHRHHAIDALVMACTKISYVQELSKWNRYNRNAELKKFPLPWETFWSDANRAVDKILISHKKVSNDITGRTHISEKNGKKYKNVGVAARGQLHKETVYGKRTFNGEEAFHVRKTIDSLTTEKQLEKVVDESIKLLIKKRVQELGGFVKGAIPANTFFVVDENGIKQPQIFLPNKNGAPVPVLKVRMKENIGGAEKLKENVNQWVNPRNNHHVLIYKDEKGNLKEEVVTFWTVVERKRTGQSAYQLPFDGKEIVTTLHINDMFLLGLNEEEINWENPDYEVLKEHLYRVQKFTSGDYYFRIAKTSSIQNAIEKQQINSFGFGKNGWSTHNPIKVKISVSGKISKV

SEQ ID NO: 1020 - protein, 1439 aa, Empedobacter falsenii
MTKTILGLDLGTNSIGWALVQQDFENKQGEILGMGSRIIPMSQDILGEFGRGNSISQTAERTGYRGVRRLRERHLLRRERLHRTLNILGFLPKHYANEIDFTKRFGKFINHAEPKLPYKNGDFLFKKSFLEMLEDFKSNQPEFLKDKNGNNCLVPYDWTIYYLRKKALSQKIEKEELAWLILNFNQKRGYYQLRGEDFAEEKDKLFVKLKVDKVVDSGEKIKGNILHDVYFDNGWKYDRQIVKTEDWVGKTKEFIVTESCLKNGDIKRTYKAVDSEKDWIAIKSKTEQDIDNSNKTVGTYIYENLLLNPKQKIKGKLVRTIERKFYKEELNQILRKQQEFHSELQNEELLQDCVRELYKHNEQHQQMLESKDFVHLFLNDIIFYQRPLRSQKSSISNCTLEKRISKEGVVFSIKVISKSNPYYQEFRLLQWLQNLEIYRNEDDTKVTTEFITSVEDKEALFDFLNSKKEVEQKHVIDFLLKQKSNKNKLPKGEAEKYRWNYVQDKKYPMNETRYLIQSKLDKVEDVPNDFLSFENEMALWHIIYSVNDKIEYEKALAKFALKHQLDEASFVESFKKFPPFKSDYGSFSEKAIKKLLPLMRFGNQWNYDAIDNISKERIYKIITGEYDEKIKNRVREKAEQFNLTTENNFQNLPLWLAQYVAYGRHSEAEITGKWNSVSDLENYLKEFKQHSLRNPIVEQVITETLRVVKDIWQEYGKGAQDFFSEIHIELGREMKNTADERKRLTNVVTENENTNLRIKALLAELALDATVENVRPYSPMQQDILKIYEEGVLNAEENIEEDILKISKTAQPSSSDLKRYKLWLEQRYRSPYTGQMIPLNKLFSHEYEIEHIIPQSLFFDDSLSNKIICESAVNKLKDNRIGLAFIKAYHGEVVPLGNGKTVKILEVQDYEDFVKQNYSKNRTKRNKLLMEDIPEKMIERQLNDTRYISKYISHLLSNIVRDVTPDSKDDGINSINVLPGNGKITTRLKQDWGLNDVWNELILPRFERMNELTNSTDFTSTNTNGKVIPTVPIELSKGFSKKRIDHRHHAMDALVIACATRDHVNLLNNESAKSETKRYDLNRKLRVYEKVTYKDQKTGEQITREVPKDFLKPWTQFTIEAKNALENIVVSFKQNTRVINKATNYYESYKDENGNLRFDKNGKPKKDFVEQKGMNWAVRKPLHKETVSGQVHLDRVKVAKGKILSATRKSLDTTFNEKTIQSITDTGIQKILLNYLKAKGSPEVAFSPEGIEEMNKTISLYNEGKNHQPILKVRVFEQGSKFPLGETGNKTKKFVEAAKGTNLFFGIYEDKAGKRSYNTIPLNLVIERQKQGLSPVSEINDKGHRLLFHLSPNDLVVIPKDGDINSKDVYKVVSFTGGRLYVIPHFVSSVIVNKIEYTQLNKIELTKEKDLIKKIEFDRLGNLISKSSKLEELFYKRRM

SEQ ID NO: 1021 - protein, 1130 aa, Pseudomonas aeruginosa
MKYRLGIDLGTASLGVVAVEMQNDEPRQIAWHALRLFKEPLDDSPKGLQPRSGERRTARLQRRQVERRARRLRRIAHLLTLLGPEWKDRCRMNVRHLTEKRAHAARLRIEPWELGCVLLRMAKRRGYSGGFRASESAAGMVKTASERLQQAMSLLAAERGLDRITLGEYLWYRQENGLPVHLKASRPSLAESDPLYALREMLEHEFQQIWETQAKYHSALNGDYLGRPLKAWFYDALFYQRPLKSIAGMVGNCLLEPNLPRAPKAHPAAQWFRIEKSLHDLRWGGGRRAPRLSRAQLDLLRELLGQPGNADARVSFKQMLAALDEAGLGDALGRSLNLENGGRDGLIGHRTLTTWRKLGLKDQWLALAPGLQTTLINLLADLGSPEVLDQEGWHLKVPRANTKPGDPNPYRKFAPELVRFVDQLREQCNDKGQRVYDRFTTMGFEAGRSSYSIKALERLNAWFADPWWPDEGPGAERRGEVDEEAALRVCYPHLFQPAPARLDELKAAPETGSAVVDVALRQLRRVINQCIAALGSPPQEVIIEMGREVGRGVEWRNEQARRMRENEKVRRKIADSLAAHGLSASSGRVLRYQLWLEQGEQWCPYCNHPISLEAATCGMTHAEHILPRALTQVGRKRSELVLAHASCNDLKGERTPWQAFGSDPQRWAAVERAAAQFEAQGRKLYARDRAKAQGLYRKARLLLLKDYEQDVLSDESLAGFADRQMHQTSWIARVAAQWVKSITPLVSVSRGEMTALLRHQWRLETVIPEVRLDEGFSVLDTERQPVTAEDFARFRRQWEGHPSSHGDERTERRLEKRLDHRHHVIDALVVALTSRSLYMKLARHYREEGERRARGESRRRDWGIAPPMPHLRDQALAMIRGCNLSHKPDRNASGGLFKDKPYGVTRPSEGAVQRLTRRKNLLELADEKSVSATYTAIVSIASEEVRKLVLDTFEARLSAGQSIKEALSCPVDYPRYRTQIWRVRCLTPYKADNVKRITHRSRGGEHHKYLLHAGYACLEIAPIEHEIGCDAKVKRKPAFSTRLITMVEATQPGFNMPAPGVRRLFKGDTVRNSEDGRIYVVAYFQENGRKISLVPFCETRNYGNMKKDGDKNKREIAFSKAVCLELLPDG

SEQ ID NO: 1022 - protein, 1386 aa, Psychroserpens sp.
MKRILGLDLGTTSIGWALVEESKNKEESNIIKLGVRVNPLTVDEKINFEGGKPITTNADRTLKRGARRNLDRYQLRRDFLIHELKKQNFITENTPLTEIGKDTTHQTIALRALAARKKVSLEDLSKILLGINKKRGYKSSRKSKDENDGVAIDGMVVAKILYDNKLMPGQYVFNLLTQEKKHIPDFYPSDLKTEFDAIWTKQKEYYPEILTQILYQDLKGKNKGQTWTICSKPFQIEGIKLEGNRNEQKIKRYELRKDGLSKKLSLEHLAIVFQEINNDIKGTSGYLGKISDRSKELYIDKLTVGEYLYNQIKKNPHTSLKNQVFYRQDYLDEFEQIWNTQAEFHPELSDELKAKIRDIIIFYQRPLKSQKGLLSFCLFESWQQEYFDEVKQTKRKRTIGQRVIPKSSPLFQEFKIWQNINNLEFKYFGNPKDGSDKDAASFKLDEEDRKLLFLEANLRGDLNETSVLKLLGLSTKEWKTNFKEGIKGNTTNEKLFNVYQEIATREGYGIDWKENSATEILEELKAVFPSIGIDASLLEFDGTLQGNTYSKQTSYELWHLLYSAGDDTVISEEDKLIYGNSDVSLKKKLHQKYGFEPVYAAMLANISFPNDYGNLSARAIRKILPYLQDGFNYYEACDKAGYNHSNSITSEENKKRELKERLEILGKNSLRNPVVEKILNQMIHVVNQICDTYGKPDEIRIELARDLKKSAKERLETTKYINSATKINLDIAKTIQQQFGFTPTKNDIVKYKLWNELAPRGHKSLFSDEQIKLQDLFSSKIDIEHILPKALIYDDSFSNKTLAYRHVNLKKANRTAIDFITQDKNTELENYIERVEGLYDKGKGPISRGKRDRLLKSAKDIKEGFIERDLRNSQYIAKKSRTMLLEVFKEVTPTTGRITDRLREDWGIINVLKELNLPKYRAIGLIEIEERKNDKKIEKIKDWTKRNDHRHHAMDALAVAFTTHNHIQYINNLNARRDETHDKHKTIQNIETLITQKFEDDKGNYKRKFIKPMPKFRSEAKRHLEDILVSFKTKNKVVTRNLNKTKKDGGFNTALELTPRGQLHEATIYGKSKAPKQKPTKINKNFSIGEVQQIIHFGQRELVLKHLSQFENDPKKAFDTKTLKNQPLAWNDEPLNEVLCFEDIFTIRKDVSPGLNIDKVVDLGIREILKQRKAKHNGNEKEAFSDLDKKPIWQNKGKGIAIKRVTITGVSNAEPLHYKNDHVGEVLLDELDKKIPVDYVSLGNNHHVAIYEDDKGKLQEKVVSLYEAVERVNQNLPIIAKGYNAHLNWKFKFTMKQNEMFIFPSKEFNLNEIDLINGINSSMISQCLFRVQSISTKDYRFRHHLETSSDNNLDFTYQRIRSPERLRDLIKVRLNHLGQIVQIGEY

SEQ ID NO: 1023 - protein, 1081 aa, unidentified
  REGION 1..1081: note = NCBI_JUNU01000017:138543138_7
MTAFKPNPLNYILGLDIGIASVGWAMVEIDNEENPIRLIDLGVRVFERAEVPKTGDSLAAARRAARSIRRLTRRRAHRLLRARRLLKHEGVLKPEDFDENGFIKLLPNTPWQLRAAALDRRLAPLEWAAVLLHLVKHRGYLSQRKNEGETADKELGALLKGVADNAHALQAGDFRTPAELALNKFEKESGHIRNQRGDYSHTFSRKDLQAELVLLFEKQKEFGNPHVSDDLKNGIENLLMTQRPALSGDAIQKMLGHCTFEPAEPKAAKNTYTAERFIWLTKLNNLRILNQGNERPLTDAERTTLMDEPYKKSKLTYAQARKLLDLDDTAFFKGLRYGKDNAESATLMEMKAYHAISRALEKEGLKDKKSPLSISPELQDEIGTAFSLFKTDEDITGRLKGCLQSEILDALLKHISFDKFVQISLKALRRIVPLMEQGKRYDEACAEIYGDHHGRKNSEETLYLPPIPADEIRNPVVLRALSQARKVINAVVRRYGSPARIHIETAREVGKSFKDRKEIEKRQEENRKDREKAAAKFREYFPNFVGEPKSKDILKLRLYEQQHGKCLYSGKVIDIRRLNEKGYVEIDHALPFSRTWDDSFNNKVLVLGSENQNKGNRTPYEYFNGKDNSREWLEFKARVETSRFPHSKKQRVLLQKFDEEGFKERNLNDTRYVNRFLCQFVADHMQLTGKGKRRVFASNGQITNLLRGFWGLHKVRAENDRHHALDAVVVACSTVAMQQRITRFVRYKEMNAFDGKTVDKETGEVLHQKTHFPQPWEFFTQEVMIRVFDKPDGEPEFEEADTPEKLRALLAEKLPSRPEAIHEYVMPLFVSRAPNRKMSGQGHMETVKSAKRLNEGISVLRVPLTQLKLKDLEKMVNREREPKVYAGLKARLEAHKDDPAKAFAEPFYKHDKAGNPTQQVKAVRIEQVQKTGVLVRNRNGVADNATMVRVDVFEKAGKYYLVPIYSWQVAKGILPDRAVVAYADEENWTVMDESFEFRFALYSNDLIKVQLKKDSFLGYFSGLDRATGAISLREHDLEKSKGKDGMHRIGVKTALSFQKYQIDELGKEIRPCRLKKRPPVR

SEQ ID NO: 1024 - protein, 1391 aa, Staphylococcus pasteuri
MTNKTWYLGLDIGTASVGWTATDTEYKIIRKNKKRLWGVRLFEEATTAEERRGYRSSRRRLARKKSRLNLLEELFTQEIAKIDANFFLRLKESQYHYEDKTHQVPYAIFNDKHYTDKDYYKEYPTIYHLRTKLMTEENPDIRKVFLAIHHILKNRGHFLLQGQSFKDGNLNNLIKELLDLDILHIGFDVTEEVASKIATISLEKKTLTDKVNDLKKLYPKEKQLLEVFRLIFGGKTSLDKLFVIDEYKELDASVKSVSFKEKIYEEVRHDYEQVLSNYIELLDLAKLVYDSIILSDIKKEGKTLSESKVDLYNKHRDDLTKLKNLVKNDSKLSEDKKVELYSVIFKEDKDKGTNYVNYIRKSEEGKGCNYEDFKKFLVKELAKLEESTAKDEILRDLELELFLPLQRTKDNSVVPYQIHKEELVKILDNAAKYHSFLDEKDESGYSIREKVIQLLEFRIPYYVGPLNSSKKAKEDGFAWSVRNKGYENTPVTPWNYEKVIDESASAEKFITNLTNKCTYLKGEDVLPKSSLLYSEFALLNELNALKYDGNRISLEARNVIIEKLFKQQGKKVTKTSIKNLLKAEGYIDGKGEITGIDITVKNDLKSYRDFKKILGDKFNTKHVEDIILWITLYGESRKLIKAKIEAVYGDIYSKEEIAKMSRLVYKDWGRFSRKLLTELVSKKLYNEETGECLNIIGSMRQNNILFMELLADRFDYSQQIIDYNKELQKEVTEITPEILDDLYVSPSVKRSIWQTVRIVEELKKIIGCAPTKIFVETTRSNQEKKKPTDSRKKQLELFYKAVKKDVKELEKEIGSLNFDKLNERLSSVEPSKLKAKKLYLYYTQLGRCMYSGETIDITQLNTTAYDIDHIYPQSKVKDDSFTNTVLVKREYNAAKTDRYPLGSDIQTPSNRKFWKFLKEKGLITDEKYNRLVRTEEFSDEELTGFIARQLVETSQSVKAVASILGELNPETSICYSKAENVSSFRQNFGKIKDGNRKSENTEQLIKVREINDYHHAKDAYLNVVVGNVYDTKFTRNVFNFIKDKKDGRKYSLNNVFYENVSNSNTVAWEMNKTVHQVEKVMNNNNILVTRRTSEQKGGLFNATVYKAKVASKAKEGVYYPLKTSNNVIKDVTKYGGYTSIGIAYYSIFEYILVNKKGEEKITRIIPIPIYISQNIKDDSTLLEFGKTQINIKSNEEIKDFKLKYKKLCIGSIIFINNYPYYIGGKSGDTFYYDNAVQVILDKESEKYIKNISKYQNWKKENKDGELWESITKEKNIKLYNTLVEKMNSGIFTKKKPNKFEELNIDEVRNNFNNVSLDDQAKVLLEILNLLTNKKSIFDLKLINIALGRSRYNFNITSQSQFSIVEQSVTGFYEKEITIIGDKENDMENNNS

SEQ ID NO: 1025 - protein, 1338 aa, Lactobacillus salivarius
MERYHIGLDIGTSSIGWAVTGDDFKIKRKKGKNLIGTRLFKEGNTAAERRGFRTQRRRLNRRKWRLKLLEEIFDPYMAEVDEYFFARLKDSNLSPKDSNKKYLGSLLFPDISDSNFYDKYPTIYHLRRDLMEKDEKFDLREIYLAIHHIVKYRGNFLENVPAKNYKNSGASIGFLLEEVNNLYKDIVGDENVTILNSEKFEDVEKIILDDGIRNLDKQKGVGKLLVEDKKNKNLVTAFSKAIFGYKFNIEDLLLVEGDEKSKLTFNDENIDDIFNELSHSLDDRRMDLLTKTREIYFKFKLNMIVPTGYTLSESMIEKYEIHKAHLKMYKEFINTLNSKDRKILKNAYTDYINNEKAKAANAQENFYKTVKKTIKDNDSDIVKKIIDLIDEGNFMPKQRTGENGVIPHQLHQIELDRIIENQAKYYPWLAEENPVEKNRKFAKYKLDELVTFRVPYYVGPLVDKTESNKNEKETKFAWMVRKSKGTITPWNFENLVDRTESANRFIKRMTSKDTYIIGEDVLPASSLLYEKFKVLNELNNIKVNEKKLDIEQKQNIYLKLFTTTKNVTKKNLATFLNCSIESISGLSDDKKFNSSLSSYIDLKVILGDIVDDYSKNEDLEKIIEYSTIFEDSNIYKEKLSEILWLTDDQIEKLSNIHFKGWGRLSKRLLMQVTNDNGERIIDALWNTSNNFMQIVNDESIQSELAKINGEYSTKSGLEDILDEAYTSPQNKKAIRQVIKVVEDIEKAMQCEPASISIEFTRRKEKSRLTNTRYKKISETYEKITDELMSEYELGRLQSELENNANDMRDRYYLYFMQLGRDMYTGEKINIDELHQKYDIDHILPQSFIKDDSLNNRVLTRKDINNKEKSDKTAADLYATKMGNFWRKLYEQGLITKQKYNNLLTRTDSINKYVKQGFIKRQLVETSQVVKLVANILQDKYANTKIIEIRAKLNSDLRKEYELIKNREVNDYHHAIDGYLTTFIGQYLYRTYPKLQSYFVYNNFKKLDSKYLERLGRFNFLWQLEDNKTIDVYDNTNNEFVLNVPEMKEYIQKINNYKYMLVSKEVTTERGAFYKETKYKAGGTSLIPIKQNRPINIYGGYKEKRNSYMMLVKINKKKETIYKIVGIPRLLSDKLDRLSTAGEKQLLLEEIARTSLSKTEQDFKIILDKIYYGQLIVDGNQKYTLGSVIYKHNAMQLHLSKKALEALAVGKTRSREISNEELIAVYEEILLAVNKYFELYDISKFRQKLNNGLEIFKELPIYNIYENNKIKKVGKFEVLNRILIGLHANAMRTDLSVLGFKDLGKLQVNGGIKLSPDAKLIYQSPTGIFSRVVRVKDLG

SEQ ID NO: 1026 - protein, 1056 aa, unidentified
  source 1..1056: note = Haemophilus
MENKNLHYILGLDLGIASVGWAVVEIDEKENPLRLIDVGVRTFERAEVPKTGESLALSRRLARSARRLTQRRVARLKKAKRLLKSENILLSTDERLPHQVWQLRVEGLDRKLERQEWAAVLLHLIKHRGYLSQRKNESKSENKELGALLSGVASNHELLQQATYRTPAELAVKKFEVEEGHIRNQQGAYTHTFSRLDLLAEMELLFSRQQHFGNPFASEKLLENLTSLLMWQKPALSGEAILKMLGKCTFEDEYKAAKNTYSAERFVWITKLNNLRIQENGLERALNDNERLMLINQPYEKAKLNYAQVRSRLNLSDEAIFKGVRYSGEDKKAIETKTTLMEMKTYHQIRKVLEGNNLKAEWAELKANPTLLDEIGTAFSLYKTDEDISGYLAGKLSQPVLDVLLENLSFDKFIQLSLKALYKLLPLMQQGLRYDEACREIYGDHYGKKTEENHHFLPQIPADEIRNPVVLRTLTQARKVINGVVRLYGSPARIHIETGREVGKSYKDRRELEKRQEENRKQRENAIKEFKEYFPHFAGEPKTKDILKMRLYKQQNAKCLYSGKPIELHRLLEKGYVEVDHALPFSRTWDNSFSNKVLVLANENQNKGNSTPFEWLDGKHNSERWRAFKALIETSAFPYAKKQRILSQKLDEKGFIERNLNDTRYVARFLCNFIADNMHLTGEGKRKVFASNGQITALLRSRWGLAKSREDNDRHHALDAVVVACSTVAMQQKITRFVRFEEGNVFTGERRDRETGEIIPLHFPAPWQFFKQEVEIRIFSDNPKLELENRLSDRPQANHEFVQPLFVSRMPTRKMTGQGHMETVKSAKRLNEGISVIKIPLTKLKLKDLELMVNREREKDLYKSLKARLEAFNDDPAKAFTESFVKNGWAIVKSIRVEKVQKSGVLVHAGNGVADNASGSIVRVDVFIKDRKYFLVPIYTWQVAKGILPNRAVIADTDENEWEMMDENSTFQFSLHPNDLIRVKTKKDEFWGYFNGLNRHTGGINIRTHDLEKSKGKQGIFEGIGVKIALSFEKYQVDELGKNIRLCKPSKRQPVR

SEQ ID NO: 1027 - protein, 1132 aa, Rothia dentocariosa
MSADSLNYRIGVDVGDRSVGLAAIEFDDDGFPIKKLAMVTFRHDGGMDPATGKTPKSRKETAGVARRTMRMRRRKKKRLKELDKKLRDLGYFVPRDEEPQTYEAWSSRARLAESRFEDPQECGEHLVRAVRHMARHRGWRNPWWSFSQLEEASQKSSETFGRILERAQHEWGERVSDNATLGMLGALAANNNILLRPRRYEHNPKTGKNAEKLNVRGQEPILLDKVRQEDVLAELRRICKVQGIEDQYPELAHAVFTQVRPYVPTERVGKDPLQPMKIRASRASLEFQEFRIRDAVANLRIRVGGSERRPLTEEEYDRAVDYLMEYSDTTPPTWGEVADELEIAENTLIAPVIDDVRLNVAPYDRSSAIVEAKLKRKTQARQWWDDDANLDLRSQLILLVSDATDDTARIAENSGLLEVFESWSDEEKQTLQDLKFDSGRAAYSIDTLNKLNAYMHEHRVGLHEARQNIFGVSDTWRPPRDRLDEPTGQPTVDRVLTIVRRFILDCERAWGRPQKIVVEHARTGLMGPSQRADVLKEIARNRNANERIRQELREGGIEAPNRADIRRNSIIQDQESQCLYCGKEIGVLTAELDHIVPRAGGGSSKRENLAAVCRACNASKGSRPFAVWAGPARLERTIQRLRELQAFKTKSKKRTLNAIIRRLKQREEDEPIDERSLASTSYAATSIRERLEQHFNDDLPDGFAPVAVDVYGGSLTRESRRAGGIDKSIMLRGQSDKNRFDVRHHAIDAAVMTLLNPSVAVTLEQRRMLKQENDYSSPRGQHDNGWRDFIGRGEASQSKFLHWKKTAVVLADLISEAIEQDTIPVVNPLRLRPQNGSVHKDTVEAVLERTVGDSWTDKQVSRIVDPNTYIAFLSLLGKKKELEADHQRLVSVSAGVKLLADERVQIFPEEAASILTPRGVVKIGDSIHHARLYGWKNQRGDIQVGMLRVFGAEFPWFMRESGVKDILRVPIPQGSQSYRDLAATTRKFIENGQATEFGWITQNDEIEISAEEYLATDKGDILSDFLTVLPENRWKVVGIGDNRRFKIRPLLLSNEIIPDTLNGRSIKSEERDLIVSVLDKGVRVVASTLLTLPSTKIIRRNNLGIPRWRGNGHLPTSLDIQRAATQALEGRD

SEQ ID NO: 1028 - protein, 1357 aa, unidentified
  source 1..1357: note = Granulicatella
MIKLFCKLLNLGGCFMNKPYSIGLDIGTNSVGWAVITDDYKVPSKKMKVEGNTDKKYIKKNLLGALLFEGGETAKETRMKRGQRRRYTRRRNRLLYLQEIFKSEIDKVDPNFFMRLEESFLWPDDKQGSKHPIFGTLKEELEYHETFPTIYHLRKELADSDTKADIRLVYLALAHIIKYRGHFLFEKVDPKNANLKGNFSKFVDIYNEVFDDDKDSSVEVESILVAKSTKSKKIEDIIKLYPGLKKGDFFAKFISLAVGTSVSFQKEFELENECKLQIPRESFEEDLEGLQGQIPDEYFEVLYSAKALYDSILLSSMLSDISGTEAPLSSSMVRRFTEHKEDLERLKRFFKSHPTYDYNSFFNDNTKPYYAGYIDGKTSQVEFYKAVKKFFEKDNDAHWIIDKIDQEDFLRKQRTFDNGAIPHQIHLAELKAIIEKQKKYYPFLEKEAERIEIILTFRIPYYVGPLSNGHSKFGWIVRRGNEAIKPWNLEEQIDKGATAEQFITRMTNRCTYLPSENVLPKHSLLYEKFMIFNELTKIRYVLENNKHFAVDNEMKIKIFEMLFKKTRKVTEKQLLAFFDKEYPDFHITKVMGLDRKKPQFNSSYATYHDLKKIVSQEYLDNPENAEEIEDIIQTLTLFEDREIIREKLSEYKDHFTKEQLKKLERRHYTGWGQLSKKLICGIRDKQTHKTIMEFLEDDGYTNRNLMQLVTADELSFAKEIKDASSIDTTQSLRELVQEIPGSPAIKKGIHQSLKIVEEIRRVMGYDPENIVIEMAREAQATAEGERRSRERMRSLEKALAEFEGKVNVSLPKENKLLTNKRLYLYYLQNGKDIYTGADLDINLLSTYDIDHIIPQSFIKDDSLDNIALTTREDNRGKLDNVPSSEVVRKMKGYWQQLLKAGLMSDRKYNNLTKAERGGLTEDDKKVFIRRQLVETRQITKQVARILDERFNHEKNESGEPIRKVRVITLKSKLVSDFRKKFELYKVREINDFHHAHDAYLNAIVGTLLLKKYPKLESEFVYGAFKKLTTRQTYEKATRRFLFYSNILNFLNGPLEDRVTEDGELIWDNDKDLPIVRNVLNMPQVNIVKKIERVESGPLYKETIHPREEKDDSKLISIKRNLSTKKYGGYKEPLEAYSLLVAFEEIAKGNKKISRKVVKIPIKDVVLVEKDVIGYLNGKGINNTVGIFKIYKNSLFEFENGRRRLLSSATELQKGNTLYLSREFIPLLYNCSKYVDESEDDYDKYISEHKMLFEPLFERIMDFVDSYIQKPKVSDRLRKVFNTRFSESNNLEIAKSFVNLLTITNLGASSTFVFFGEEITRNNYRYNSSKEHADGILVLQALTGLYETRIDLSKFGEQ

SEQ ID NO: 1029 - protein, 1458 aa, Capnocytophaga ochracea
MKHILGLDLGSNSIGWALVQQDFENKQGKIIATGSRIIPMDQGILGDFERGNTVSQTAERTTYRSTRRLRERHLLRRERLHRVLHILGFLPPHYDAQIDFTKRYGKFIDNAEPKIAYNNGNFIFMNSFNEMIEDFKKHQPQLFYKKSNGEESKIPYDWTIYYLRKKALSQKITQQELAWLILHFNQKRGYYQLRGEEETENPNKEVAFHTLKVVEVEAEAPNKKGEIWYTVRLENGWIYRRTSKIPLDDWKGKTRDFIVTTDLNDDGTIKVDKEGKEKRSFRAPDENDWNLLKKKTEHDIDFSGKPVGTYIYDHLLQNPNQKIKGKLVRTIERKYYKDELKAILAKQIALQPELFTETLLADCIRELYRKNETQQQNLLSKDFLHLFVEDIIFYQRPLRSKKSTIANCTLEKRSYIDKETNERKDTPIKVCAKSNPYYQEFRVLQWLQNLRIYEIETDREVTVEFIETAQDNEALFNFLMSQKEIDNESLLKYFLLAKNPQIKDKTAKIELKKWITTYRWNYVYDVADNSSKKYPMNETGYDLQRYLQKVEGLPANFLTFDITYRLWHLLYSVKDKVEFEKALKKFAQEYQLDEASFVDSFKNFKPYPNEYGSFSEKAIKKLLPLMRFGNHWNFNRIDVSTQKRIDDLINGVANDEIRTIIREKAEKYQLNSETCFQGLPLWLAQYVVYNRHAEATDIEKWTSVNDLEAYLEDFKQHSLRNPIVEQVITETLRVVRDIWQRYGGGQANFFDEIHIELGRELKKTAEERKQLSNRNQENENTNLRIKKLLAELKEDASIQNVRPYSPVQQELLKIYEEGVFSATDEVEEDIQKIRKKAEPTTPEIQRYKLWLEQKYKSPYTGEVISLTKLFTEEYEIEHIIPQSRYYDDSLSNKVICESAVNKLKTNQLGLEFIQNHHGEKVRITGNKEVTIFTEEQYKEFVKKHYANNSAKQQKLLLNEIPEKMVARQLNDTRYISKYISEILSKIVRSDEKDEGVNSKNVIPCTGKITTALKQDWGLNDVWNELILPRFERMNQLTQTQLFTSYNDRLQKNLPTVPIEYSQGFQKKRIDHRHHAMDALVIACATREHINYMNNQHALDKNKDKKEKQQSRIDLRAILCEKKNNNWQFKKPWATFTQEAKESLEHIVVSFKQNLRVINKATNYYEKWEEKNGVLVKKKVKQEGTNWAIRKPLHKETISGKIVLDRKIGKDKILTATRKAVDITFTEKIISSITDTGIQKILLNYLKYKGSPEVAFSAEGLEELNKNIAQYNNGKEHQPIYKVRIFEEGSKFPLGETGAKATKYVEAAKGTNLFFGVYQGKGKRTYATIPLNEVIERQKQGLPSVPERNEKGEPLLFTLSPNDLVYVPMEGEIAETIDFNNLSKEQKERIYKTVSFTGNECHFVKSTIASLIKSYDAKSKIGELGSLNKLEVTISGDNSRIKEVCIKLKVDRLGNITKA

SEQ ID NO: 1030 - protein, 1134 aa, Alloscardovia omnicolens
MALKRIYRIGIDVGLYSTGLSAVEVDSNGTPIRILNMQSVIHDGGVDPNSNKTADTRKMISGVARRTRRMRRRRKSRLANLDKYLESLGFPITNYGDDTFEPWMLRARLADGYIPDEEQRKYMLSVAFRHIARHRGWRNPYKSVKSLYSVSLDDLSERYDDLCDACQVNPEDGLTPAQIIGDYVASKDGQVAPRIRHSGSKAEAFAPLPQKLMQEDNAYEVRYICEQQGIDETTRRKLIDKIFYAVSPRGSASERVALDDLTHEKRATKASLAFQKFRIVAALSFLRIAIDGTERPLTIEEKNIAFDILTSMESKSRPTWTDVADALGVNRRDIKGIGGIQDDGDRISNRAPVMDSYFALAESAGALGKLVKQVIMPWWRDASDNDRERLLELLGNTIDIDSIRDDISYSNAFELIDSFDDDQLGAIDNIKLPAGRAAYSIRACQELTDRMLSTSDNLHDARKAVYGVTDNWKPAQESIGAPIGNPSADRVLKIVNRYLMNCTARWGTPVGVNIEHAREGFSSAKVARAYQKDAEAYATNRSAIFDKIKDLYPDFNRFSDSAMKRWEAIQRQNGECLYCGATLKFTTCELDHIVPRKGVGATNTKTNLAAVCTDCNRAKSKKLFSLWCHDDYAVSRGITVANAVARVEMFNFPAGTLNAANAKRFKQAVISRLTQVTEDEAPDNRSMESVSWMADELHKRIDWYYNSQRYIATEDVPERSVKVFVYSGLSTSLARRFSGIEKRIHFAGPEGKTRLDRRHHAVDAAVIALMQHNVAEVLVDKNELRKAQLYSQKDDGTDWREYSGKDDDQRFLYGRWLGNMQALLDLLNEELDDDRVQILRNLRLELGNSRAHEDTIHKLSRVRLGDKLDASLIQRASTPALYTALTRCDDFDEKTGLPENRERHIVVNGVHYGPEDETLFFEKNAAQIMVHNGSAEIGDGFHHARIYVCDKVNKAGKKTGEFYGMIRVFAADLAKSRSEDLLNVTLSDSSLSMRYGDPRTVKAIREGRARFVGHLFVGDELRLDLSQTGYTGQVKEFADFLQPWCSTKLYATWTVEGYFSPSQLRLRPSYLSAEGLEKLDMPISEDVQKIFTRGWLPSVNAVSAFFPSVIRRNGLGEIRWKSNAGLPVSYRWHE

SEQ ID NO: 1031 - protein, 1129 aa, Streptococcus pseudopneumoniae
MNGLVLGLDIGIASVGAGILKKDSGEIIHSNARLFPAATADNNVVRRGSRQARRLTRRKRHRAVRLHDLFEDYGLLTDFSKVSINLNPYKLRVEGMNIQLTTEELFIALKNIIKRRGISYLDDASEDGGTVSSDYGKAVEENRKLLSEQTPGQIQLERFEKYGQVRGDFTVEENGEKRRLINVFSTSAYRKEAERILRKQQEFNNKITDDFIEDYLTILTGKRKYYHGPGNKKSRTDYGRYTTKKDSEGKYITLDNIFSVLIGKCTFYPEEYRASKASYTAQEFNLLNDLNNLTVPTETKKLSEEQKKTIVEYAKTARTLGASTLLKYIAKLIDASADQIHGYRVDVNKKPEMHTFDVYRKMQSLETFNVNEMPREVLDELAHILTLNTEREGIEEAINTKLKGTFNQDQVLELVQFRKNNSNLFSKGWHNFSLKLMMELIPELYATSEEQMTILTRLGKQKSKEISKRTKYIDEKEITEEIYNPVVAKSVRQAIKIINEATKQYGIFDHIVIEMARETNEEDAKKDYIKRQKANLDEKNAAMEKAAFQYNGKKELPDSIFHGHKELATKIRLWHQQGEKCLYTGKNIPISDLIQNQYKYEIDHILPLSLSFDDSLSNKVLVLATANQEKGQRTPFQALDRMDDAWSYREFKSYVKDSKLLGNKKKDYLLTEEDISKIEVKQKFIERNLVDTRYSSRVVLNALQDFYKNHHFDTTISVVRGQFTSQLRRKWGLEKSRETYHHHAVDALIIAASSQLRLWKKQNNPLIFYKEGQFVDSETGEILSLNDDEYKELVFKAPYDHFVDTLRSKTFEDSILFSYQVDSKYNRKISDATIYATRKAKLDKDKSKETYVLSKIKDIYSQAGYDAFIKIYNKDKSKFLMYHKDSQTFEKVIEEILRTYPSKEFNDKNKEVPCNPFEKYRQENGPIRKYSKKGNGPEIKSLKYYDKNIPESFINITPSNSKNKVILRQLNPWRTDVYFNHQTEKYELLGLKYADLQFEKKTGTYSITIDKYNEIKEKEGVGEQSEFKFTLYKNDLLLIKDTKNNEKQIFRFLSRTMPNVKHYVELKPYNKAKFDGNQPLITIFGNVAKGGQCLKGLNKPNISIYKIKTDVLGNKYFIKKEGDKPKLKF

SEQ ID NO: 1032 - protein, 1366 aa, Streptococcus parasanguinis
MKKPYSIGLDIGTNSVGWAVITDDYKVPAKKMKVLGNTNKESIKKNLIGALLFDAGNTAADRRLKRTARRRYTRRRNRILYLQEIFAAEMNKVDESFFHRLDDSFLVPEDKRGSKYPIFGTLEEEKEYHKQFPTIYYLRKILADSKEKVDLRLIYLALAHIIKYRGHFLYEDSFDIKNNDIQKIFNEFTILYDNTFEESSLSKGNAQVEEIFTDKISKSAKRDRVLKLFPDEKSTGLFSEFLKLIVGNQADFKKHFDLEEKAPLQFSKDTYEEDLESLLGQIGDVYADLFVVAKKLYDAILLAGILSVKDPGTKAPLSASMIERYDNHQNDLSALKQFVRRNLPEKYAEVFSDDSKDGYAGYIDGKTTQEGFYKYIKNLISKIEGAEYFLEKIEREDFLRKQRTFDNGSIPHQIHLQEMNAILRHQGEYYPFLKENKDKIEQILTFRIPYYVGPLARGNSDFAWLSRNSDEAIRPWNFEEMVDKSSSAEDFIHRMTNYDLYLPEEKVLPKHSLLYETFTVYNELTKVKYIAEGMKDYQFLDSGQKKQIVNQLFKEKRKVTEKDIIHYLHNVDGYDGIELKGIEKHFNSSLSTYHDLLKIIKDKEFMDDPKNEEIFENIVHTLTIFEDRVMIKQRLNQYDSIFDEKVIKALTRRHYTGWGKLSAKLINGIRDKKTSKTILDYLIDDGYSNRNFMQLINDDGLSFKETIQKAQVVGETNDVKQVVQELPGSPAIKKGILQSIKIVDELVKVMGHAPESVVIEMARENQTTNKGKSKSQQRLKTLSDAISELGSNILKEHPTDNIQLQNDRLFLYYLQNGKDMYTGEALDINQLSNYDIDHIIPQAFIKDDSLDNRVLTSSKDNRGKSDNVPSLEIVEKMKGFWQQLLDSKLISERKFNNLTKAERGGLDERDKVGFIKRQLVETRQITKHVAQILDDRFNAEVNEKNQKLRSVKIITLKSNLVSNFRKEFGLYKVREINDYHHAHDAYLNAVVAKAILKKYPKLEPEFVYGDYQKYDLKRYISRTKDPKEIEKATEKYFFYSNLLNFFKDKVYYADGTIIQRGNVEYSKDTGEIAWNKKRDFAIVRKVLSYPQVNIVKKTEEQTGGFSKESILPKGNSDKLIPRKTKNVQLDTTKYGGFDSPVIAYSILLVADVEKGKSKKLKTVKSLIGITIMEKVKFEANPVAFLEGKGYQNVVEENIIRLPKYSLFELENGRRRMLASAKELQKGNEMVLPSYLIALLYHAKRIQKKDEPEHLEYIKQHHSEFNDLLNFVSEFSQKYVLAESNLEKIKNLYIDNEQTNMEEIANSFINLLTFTAFGAPAVFKFFGKDIERKRYSTVTEILKATLIHQSLTGLYETRIDLSKLGEE

SEQ ID NO: 1033 - protein, 1357 aa, unidentified
  source 1..1357: note = Lactobacillus
MTKLNQPYGIGLDIGSSSIGFAVVDANSHLLRLKGETAIGARLFREGESAAGRRASRTTRRRLSHNRWRLRFLQDFFEPHISSIDPDFFLRQKYSEISPKDKERFKYEKRLFNDRTDAQFYKQYPTMYHLRLHLMNDASKADPREIFFAIHHILKSRGHFLTPGDAKNFNTDDVDLKRIFPALTEAYAQAYPDLTLSFEASKAEKFKSILLDEDATSNDTQKALVKLLLVDDGDKELLKQQKKVLTEFAKAVAGLKAKFDVALGIEVANAENWHFGMAQLEDKWSDIEPSLTDQGMEIFEQIQDLYRARLLNGIVPAGKTLSQAKVDDYDQHCKDLKLFKEYLKQLNDHDLAKRIRLLYDRYIDGDDAKPFLRDDFVKALKKEVTAHPTELAESLLERMEQDNFMLKQRTKANGSIPVQMQQRELDQIIANQAEYYSWLAAENPVKEHRDSKPYQLDELLNFRIPYYVGPMITKKQQEKSGQNVFAWMVRRDPSGNITPYNFDEKVDREASANAFIQRMKTTDTYLIGEDVLPKQSLLYQKYEVLNELNNVRVNGESLSTDKKKRLIRELFERHSSVTLKQFVENLVAHGDVAKRPDVRGLADEKRFLSSLSTYHQLKAILGDAIDDRDKLTDIEAIITWSTVFEDAAIFKTKLNEVSWLDSKTRTSLSNIRYRGWGQFSHKLLDGLKLGNGHTIIQELVLSSRNLMQILTDTTLKEEIAALNQERLKPDSINEAIDDAYTSPSNKKAIRQVLKVIEDIKHAANDQAPSWLYIETADGGGRPGKRTLSRQKQIQAIYENTAKELIDSAVRGELKDKIADKTNFSDRLVLYFMQGGHDIYTGTALNIDQLSSYDIDHILPQSLIKDDSLDNRVLVHAKINREKNAEFASTLFAAKMASTWHRWRDAGLISGRKLKNLLMRPDEVDKYAKGFVARQLVETRQIIKLTEQIVAAQYPDTKIIAVKAGLSHQLRQELDFPKNRDVNHYHHAFDAFLAARIGTYLLKRYPNLAPFFTYGEFTKTNLKKLQSFNFIGALTHADKKITSKDTGEVLWDNQRDIEELDQIYNFKRMLITHEVYFETAGLFKQTVYAAKDSKERGGSRQLIPKKKGYSTEVYGGYSGENTAYLAVVRLVKKSGVTYKVIKIASSQAAFLGKAREKSLLEEKKLLEKMLISKFSKSGKSNSTQLEIVLPRVPREQLFHNKKYGLFLVNSDTMFHNFQELWLSRSDQKLLQKILRDSKVDEARGEEIDYLFSSIVQQVTQYFALYNIAGFRKKLQQSLEKFKSLKVSDVDATSGKISTIKELLKGTQANGVTGNLKNLNIATPFGFTQDKSGILTEDTSIIYQSPTGLFKRVIRLADL

SEQ ID NO: 1034 - protein, 1106 aa, Corynebacterium falsenii
MPTHSLKRYRVGFDVGSRSLGIAAIEIDENGMPANILNAMSFLHDAGLDPDSNKTALTRKNVSGVARRTRRMYRARKKRLEALDRFLSSHDYPLEDLANTEDMECWQARASLTSAKLTDETEFKRAFSLALRHIARHRGWRNPYSTTRSMHSQQLEPSPSLLKIREEFALLCSTPLKADATLAEMVCQLPDARVKLRGEGGLFSERLHQKDLALELHKVARGQGLEPAFICKAIDKVFDAKSPKGSASDRVGKDDLDRSQPRAWRAAREFQEYRIIALLANVRVREKEDGSKGILRPLTLAERQKVFEFLNTFTEKIPPTWGEVASLLNIDRGDLKGTATSTDDGERVSSAPPVNDTERTMANSKIKEIRNYWKDANQASKDALIREFSNVELPEDDSPEAIAASTLLRNLPEGSLENLESIRLSDGRSAYSLKTLRKLTDYMLNNEADLTDARMAIFNVDKDWKPAAAPIGEPTGNPAVDRVLKQVNRWLNMAESRWGLPESINIETLRDGFKSERLAREIERDQNQRAKKNLTVVDAMRTKLNIEGRPRRSEALRFQSIQRQNGQCAYCGSPIDFKTAELDHIVPRAGVGSTNARYNLLATCGRCNRAKGKLPFAVWAKKTEILNVSLEGALQRVQQWTTDPGLNASNMKRFQQEVIFRLKRVSEDEEIDARSKEAVSWMAVELQHRLLGYYGRSKERGSSPVKIHVFRGEVTASARRAAGIEKSFRMIGGKAGKNRLDRRHHAIDAAVIAMMQGTVAQVLTERNSLRSQQHYSGKPDAEFGAWSEYTGRRVQDQVVYRSWVQKMKALVPLLQQAIDSDHIPVVENIRLKLGNGLAHEETVHPLTRVKLGDPIAPDAVDRASTPALWTALTREPDFDWKEGLQENPNRKIQVNGTQYTATDEIELFGVKAGAIKVRNGYSELGSAFHHARLYKIRGSKKVSYAMMRVYTVDLLRYRHQDLFTCELDPNTMSARQAEPKLRAAFRAGTAEYVTWFVVGDELKLNTPNIATGQVSTFLEEFGEVTHWRIRGLYSNSKLRLKPSQLASEGISETTSADSRKVIDSPGWLPAVNKVFGEGNPILIRRDAHGRPRLESESGLPISIVIG

SEQ ID NO: 1035 - protein, 1053 aa, Staphylococcus hominis
MKRNYILGLDIGITSVGYGIIDYETRDVIDAGVRLFKEANVENNEGRRSKRGARRLKRRRRHRIQRVKKLLFDYNLLTDHSELSGINPYEARVKGLSQKLSEEEFSAALLHLAKRRGVHNVNEVEEDTGNELSTKEQISRNSKALEEKYVAELQLERLKKDGEVRGSINRFKTSDYVKEAKQLLKVQKAYHQLDQSFIDTYIDLLETRRTYYEGPGEGSPFGWKDIKEWYEMLMGHCTYFPEQLRSVKYAYNADLYNALNDLNNLVITRDENEKLEYYEKFQIIENVFKQKKKPTLKQIAKEILVNEEDIKGYRVTSTGKPEFTNLKVYHDIKDITAKKEIIENAELLDQIAKILTIYQSSEDIQEELTNLNSELTQEEIEQISKLKGYTGTHNLSLKAINLILDELWHTNDNQIAIFNRLKLVPKKVDLSQQKEIPTTLVDDFILSPVVKRSFIQSIKVINAIIKKYGLPNDIIIELAREKNSKDAQKMINEMQKRNRQTNERIEEIIRTTGKENAKYLIEKIKLHDMQEGKCLYSLEAIPLEDLLNNPFNYEVDHIIPRSVSFDNSFNNKVLVKQEENSKKGNRTPFQYLSSSDSKISYETFKKHILNLAKGKGRISKTKKEYLLEERDINRFSVQKDFINRNLVDTRYATRELMNLLRSYFRVNNLDVKVKSINGGFTSFLRRKWKFKKERNKGYKHHAEDALIIANADFIFKEWKKLDKAKKVMENQMFEEKQAESMPEIETEQEYKEIFITPHQIKHIKDFKDYKYSHRVDKKPNRELINDTLYSTRKDDKGNTLIVNNLNGLYDKDNDKLKKLINKSPEKLLMYHHDPQTYQKLKLIMEQYGDEKNPLYKYYEETGNYLTKYSKKDNGPVIKKIKYYGNKLNAHLDITDDYPNSRNKVVKLSLKPYRFDVYLDNGVYKFVTVKNLDVIKKENYYEVNSKCYEEAKKLKKISNQAEFIASFYNNDLIKINGELYRVIGVNNDLLNRIEVNMIDITYREYLENMNDKRPPRIIKTIASKTQSIKKYSTDILGNLYEVKSKKYPQIIKKR

SEQ ID NO: 1036 - protein, 1130 aa, Rothia mucilaginosa
MKNYGIGIDVGYRSVGCAAIEFDDDGFPIKTLSLVSFRHDGGLDMKGDKPKIRKATRGVARRRMSMNRRRKRRLRNLDKVLSNLGYTVPEDSGSETYEAWTSRALLASIKLASADELNEHLVRAVRHMARHRGWANPWWSLDQLEKASQEPSETFKIILARARELFGEKVPVNPTLGMLGALAANNEVLLRPRRSYKAEEANNPKKAEKYLADYGTQPLMAAKVCQEDQLAELRRICEVQGIEAQYENLREAVFTHVRPYVPKDRVGKDPLNPSEIRASRASLEFQEFRILDSVANLRVRTDSRTKRELSESEYDAAVDFLMSYTGKEQLSWADVAEEIGVPGNRLIAPVLEDVQQKTAPFDRSSAAFEKAMKAKTEARKWWESNDDDQLRSLFIMFLADATDDTAEAAVEAGLHELFASWPEEEREVLSNISFESGRAAYSAKTLSKLSEYMHEHRVGVHEARKAVFGVDDTWRPPLAKLEEPIGHPTVDRVLTILRRFVLDCERQWGRPHAITVEHARTGLVSPAVRRKILKEQEDNRKNNERIRGELRKSGVENPSRTEVRRHLVVHDQESQCLYCGAVIRTDTSELDHIVPRAGGGSSRRENLAAVCRYCNAMKSNTPFYRWASPEKLKETIDRVHQLKAFKDPKKAKMLKNQIRRLKQSEADDPIDERSLASTSYAAVAVRERLEQHFNEGLAPDDKSRVALDVYTGAVTRESRRAGGIDERILLRGEHDKNRFDVRHHAIDAAVMTLLNRSVALTLEQRHQLKREFNETKRENGWRDFIGLYPASKEKFLKWKKAATVLGDLLAEAIEDDSIAVVSPLRLRPQNGAVHDETIHAVKKQTLGSAWSAEAVKRIVDPEIYLEMKDALGKLKELPEDSARTLELPDGRFVEADDEVLFFPKKAASILTPRGAAEIGDSIHHARLYGWMTKEGELKFGMLRVYGAEFPWLMRESGSRDILHMPIHRGSQSFRGMQVGVREAVESGEAVEFGWITQDDELEFDPEDYIAHGGDDELNRLLRVMPERRWRVDGFYNAGTLRIRPALLSAEQLPSELQKKVASKTLSDVELILLRAVQRGLFVATSGFLPLESLKVIRRNNLGFPRWRGNGSLPTSFEVRSSALRALGVEG

SEQ ID NO: 1037 - protein, 1049 aa, Haemophilus parainfluenzae
MENKNLHYILGLDLGIASVGWAVVEIDKKENPLRLIDVGVRTFERAEVPKTGESLALSRRLARSARRLTQRRVTRLKKAKRLLKSENILLSTDERLPHQVWQLRVEGLDRKLERQEWAAVLLHLIKHRGYLSQRKNESKSENKELGALLSGVASNHELLQQATYRTPAELAVKKFEVEEGHIRNQQGAYTHTFSRLDLLAEMELLFSRQQHFGNPFASEKLLENLTALLMWQKPTLSGEDILKMLGKCTFEDEYKAAKNTYTAERFVWITKLNNLRIQENGLERALSDNERLMLIEQPYEKAKLTYAQVRSILNLSDDAIFKGLRYSGEDKKAIETKTTLMEMKAYHQIRKVLEGNNLKAEWAELKANPTLLDEIGTAFSLYKTDEDISAYLAGKLSQPVLNALLENLSFDKFIQLSLKALYKLLPLMQQGLRYDEACREIYGDHYGKKTEENHHFLPQIPADEIRNPVVLRTLTQARKVINGVVRLYGSPARIHIETGREVGKSYKDRRELEKRQEENRKQRENAIKEFKEYFPHFAGEPKAKDILKMRLYKQQNAKCLYSGKPIELHRLLEKGYVEVDHALPFSRTWDDSFNNKVLVLANENQNKGNLTPFEWLDGKHNSERWRAFKALVETTAFPYAKKQRILSQKLDEKGFIERNLNDTRYVARFLCNFIADNMLLTGEGKRKVFASNGQITALLRSRWGLAKSREDNDRHHALDAVVVACSTVAMQQKITRFVRFEEGDVFTGERIDRETGEIIPLHFPTPWQFFKQEVEIRIFSDNPKLDLENSLPDRPQANHEFVQPLFVSRMPIRKMTGKAHEETLRSPKKLSEGKSIKKERLSNLKLTDLERMVNKEKEPELYQSLKEHFSKYGDYSKEKFFKKGGTEVKSIRLYKTQNKYVELNNGKTIADNGDIVRVDVFKKEKKYHAVNIYAWQVAKGILSKETSTGLFLDDNYIFQFSLFKNDLIKIPDPNNKSEYLFAYFIRPDDEPRWILKLQDNAIIPDGFSKKEKNSFRFSFKNQSFIEKYHIDELGKNINLCKRSKRQAVR

SEQ ID NO: 1038 - protein, 1122 aa, Streptococcus oralis
MNGLVLGLDIGIASVGVGILEKNSGKIIHANSRIFPAATADNNVERRKNRQARRLHRRKKHRGVRLQDIFEDYGLLTDFSKVSINLNPYRLRVDGLDQQLTNEELFIALKNIVKRRGISYLDDASEDGGTVSSDYGKAVEENRKLLAEKTPGQIQLERFEKYGQVRGDFTVVENGEKRRLINVFSTSAYRKEAERILRKQQEFNSKITDEFIEDCLKILTGKRKYYHGPGNEKSRTDYGRFRTDGTTLDNIFGILIGKCTFYPNEYRASKASHTAQEFNLLNDLNNLTVPTETKKLSEEQKKVIVEYAKEAKTLGASTLLKYIAKMIDASVDQISGYRVDVNNKPEMHTFEVYRKMQSLETISVGELSRNVLDELAHILTLNTEREGIEEAINTKLKDSFSQDQVLELVQFRKNNSSLFSRGWHNFSLKLMMELIPELYETSEEQMTILTRLGKQKSKETSKRTKYIDEKELTEEIYNPVVAKSVRQAIKIINEATKKYGIFDNIVIEMARENNEEDAKKDYIKRQKANQDEKNAAMEKAAFQYNGKKELPDNIFHGHKELATKIRLWHQQGEKCLYTGKNIPISDLIHNQYKYEIDHILPLSLSFDDSLSNKVLVLATANQEKGQRTPFQALDSMDDGWSYREFKSYVKESKLLGNKKKEYLLTEEDISKIEVKQKFIERNLVDTRYSSRVVLNALQDFYKAHKFDTTISVVRGQFTSQLRRKWGLEKSRETYHHHAVDALIIAASSQLRLWKKQNNPLIAYKEGQFVDSETGEILSLSDDEYKELVFKAPYDHFVDTLRSKTFEDSILFSYQVDSKYNRKISDATIYATRKAKLDKDKSEETYVLGKIKDIYSQAGYDAFIKIYNKDKSKFLMYHKDPQTFEKVIEEILRTYPSKELNDKNKEIPCNPFEKYRQENGPIRKYSKKGNGPEIKCLKYYDNKLGNYIDITPDGSDNQVVLQSIAPWRTDVYYNHKTGKYEFLGLKYSDLYFEKGTGKYKISKEKYDNIKKIEGVVETSEFKFTLYKNDLILIKDVEKGQEQLFRFLSRNNKGKHQVQLKPMNKSDFEKGEKLIDIFGTVPNSTTQCVKGLNKSNISIFKVKTDVLGKKHIIKKEGDEPKLKF

SEQ ID NO: 1039 - protein, 1378 aa, Streptococcus pseudopneumoniae
MSNKPYSIGLDIGTNSVGWAVITDDYKVPSKKMTVLGNTDKHFIKKNLIGALLFDEGTTAEDRRLKRTARRRYTRRKNRLRYLQEIFSGEMSKVDSSFFHRLDDSFLVPEDKRGSKYPIFATLVEEKEYHKQFPTIYHLRKQLADSKEKADLRLIYLVLAHMIKYRGHFLYEEAFDIKNNDIQKIFNEFISIYDNTFEGSSLSGQNAQVETIFTDKISKSAKRERVLKLFPDEKSTGLFSEFLKLIVGNQADFKKHFDLGEKAPLQFSKDTYDEDLENLLGQIGDDFADLFLVAKKLYDAILLSGILTVTDPSTKAPLSASMIERYENHQKDLTTLKQFIKNNLPEKYDEVFSDQSKDGYAGYIDGKTTQEAFYKYIKNLLSKFEGTDYFLEKIEREDFLRKQRTFDNGSIPHQIHLQEMNAILRRQGEHYPFLKENKEKIEKILTFRIPYYVGPLARGNRDFAWLTRNSDQAIRPWNFEEIVDKASSAEDFINKMTNYDLYLPEEKVLPKHSLLYETFAVYNELTKVKFIAEGLRDYQFLDSGQKKQIVNQLFKEKRKVTEKDIIHYLHTVDGYDGIELKGIEKQFNASLSTYHDLLKIIKDKEFMDDSKNEAILENIVHTLTIFEDREMIKQRLAQYDSLFDKKVIKALTRRHYTGWGKLSAKLINGICDKQTGNTILDYLIDDGEINRNFMQLINDDGLSFKKIIQKSQVVGETDDVKQVVRELPGSPAIKKGILQSIKIVDELVKVMDHAPESIVIEMARENQTTARGKKNSQQRYKRIEDSLKILASGLDSNILKENPTDNNQLQNDRLFLYYLQNGKDMYTGEALDINQLSSYDIDHIIPQAFIKDDSLDNRVLTSSKDNRGKSDNVPSLEVVQKRKAFWQQLLDSKLISERKFNNLTKAERERDGLNELDKVGFIKRQLVETRQITKHVAQILDARFNKEVTEKDKKNRNVKIITLKSNLVSNFRKEFRLYKVREINDYHHAHDAYLNAVVAKAILKKYPKLEPEFVYGDYQKNDLKRYISRSKDPKDIEKATEKYFFYSNLLNFFKEEVHYADGTIVKRENIEYSKDTGEIAWNKEKDFATIKKVLSYPQVNIVKKTEEQTVGQNGGLFDNNIVSKEKVVDASKLIPIKSGLSPEKYGGYARPTIAYSVLVIADIEKGKTKKLKRIKEMVGITIQDKKKFEANPIAYLEECGYKNINPNLIIKLPKYSLFEFNGGQRRLLASSIELQKGNELILPYHFTALLYHAQRINKFSEPIHKQYVEAHQNEFKELLTIIISLSKKYIQKPNVESLLHQAFEQADNDIYQLSESFISLLKLTSFGAPGAFKFLGAEISQSSVRYKPNSQFLDTTLIHQSITGLYETRIDLSKLGED

SEQ ID NO: 1040 - protein, 1136 aa, Rothia mucilaginosa
MSTDMKNYRIGVDVGDRSVGLAAIEFDDAGFPIQKLALVTFRHDGGLDPTENKSPKSRKETRGVARRTMRMNRRRKQRLRDLDKVLENLGYTVPEGPEPETYEAWTSRALLASIKLASADELNEHLVRAVRHMARHRGWANPWWSLDQLEKASQEPSETFEIILARARELFGEKVPANPTLGMLGALAANNEVLMRPRRNYNAKEANNPKKAGKYLADYGTQPLMAAKVRQEDQLAELRRICEVQGIEDQYEALREAVFTHVRPYVPKDRVGKDPLNPSEIRASRASLEFQEFRILDAVANLRVRTDSRAKRELSESEYDTAVDFLMSYTGKEQPSWADVAEEIGVPGNRLIAPVLEDVQQKTAPFDRSSAAFEKAMKAKTEARKWWESNDDDQLRSLFIMFLADATDDTAQAAIEAGLYELFESWPEEEREALSNIAFEAGRAGYSATTLSKLSEYMHEHRVGLHEARKAVFGVDDTWRPPLAKLEEQTGQPTVDRVLTILRRFVLDCERQWGRPQAITVEHARTGLMGPAQRQDILREQKKNREENERIRNELRESGVENPKRVDVRRHLVIQEQECQCLYCGTMITTTTSELDHIVPRAGGGSSRRENLAAVCSYCNGQKNNTPFYRWASPERFKETIDRVRQLKAFKDPKKAKMFKNQIRRLKQTEADDPIDERSLASTSYAAVAVRERLEQHFNEGLAPDDKSRVVLDVYAGSVTRESRRAGGIDERILLRGEHDKNRFDVRHHAIDAAVMTLLNRSVALTLEQRHQMKRESAETKRDNGWRDFTGLAPASQEKFLEWRKAATVLGDLLAEAIEDDSIAVVSPLRLRPQNGSVHKDTIAAVKKQTLGSAWPSDAVKRIVDPEIYLAMKDALGKLKELPEDSARSLELPDGRFVEADDEVLFFPKNAASILTPRGVAEIGESIHHARLYGWLTKKGELKVGMLRVYGAEFPWLMRESGSRNVLSMPIHPGSQSFRGMQDAVRKVVESGEAVEFAWITQNDELEFDPADYIAHGGDDDLRRFLEYMPECRWRVDGFYDVGRLRIRPALLSREQFPLDIQRSLDEKKPLTVEQQVIVKSLEKGLAISLGNLMGLETMRVIRRNNLGFPRWRGNGSLPTSFEVRSSALRALGVEG

SEQ ID NO: 1041 - protein, 1391 aa, Lactobacillus kunkeei
MKNYHIGLDIGTSSVGFAARDDDNNLIRVKGKNVIGARLFSEGKTAQERRISRTSRRRYNRRKWRLRLLDEIFHDAIVHKDAEFFNRLKQSSLSPKDERKQYFGSLLFPEVGDGDYFRDGNQTIYHLRHRLMTQDEKADIREVYLALRHIIKYRGNFLDDTPVSSFEASDLKLASFVPTLNDLFETINVNYELSIDNVNQIENILLNNKLRNSDKSKQLTDLIAEPVTNIDDKSLKKQFDKERKDISKEIAKAVVGSKMNVNKLLSFESSDGSKISFSFSDASSEDKMLELSDILDDSRMNILNVLKVIYSRVRLNQIIPSGMGLSESMIAAYDLHKQQLKDLKTLLDVVPFNEKYAVKIAYAAYIGNIDKQRFTKAEVKTIDKLRDKKSITSVLDFKSGHITNEELNNVIKEVIVDKYLNDETFEYHDIVEKINQDISNGNYLLKQRNNQNGNIPHQLHQMELDQIIEKQSKYYPFLGKLNPNSKRSHIAKYKISELVAFRVPYYVGPLITPEEQEKTSGASFAWMKRKEDGAITPWNFEKMVDKESTASRFIKRLTVKDTYLLNEDVLPDNSLLYEKFKVLNELNVVKANNKRLTVEEKQGAFDNLFKQMKTVTAKRLKNYLVSNHNHINSVKITGLSDGEKFNNSLSVYIDFKKIFGDKIDDSKLFDDFENIIEWSTVFEDRDIFEEKVRKDISWISESEINAVVSKRYSGWGRLSKKLLNGITNDEGRNIIDELWEESETFMEAVSKPEVKEKIDEINSNFIKNTDIESVLADAYTSPQNKKAIRETYKLVKDIQKAMGGQAPSSISIEFTRNPQDKGELTRSRHSEIAKKYKELSKEVSKKLNDELKSKKNSMDVDKYYLYFMQMGIDLYDGTSIDIDDLNNYQIDHIVPQSFYKDDSFDNRVLTHYSNNQKKGNNTPLNGLNIDSNTREVWNHLIGLGLITKRKYNNLTLKGMDQLSKYTKHGFIRRQLVETSQVIKLVANILSDEYSKDDTKIIEVKAKLNSQIRQVFNLYKIRELNDYHHALDAYLTTFIGGYLYNRYPNLRNMFVYGDFKKFSAKIDNLETFNFLHDITNPSDKFEDRIIDEKSGEVILDRRHAIETIKKIYQYNYMLITREVSTKNGQLSDQTVYSARRINKVNSPIPVKKDSNPELYGFRTGNVDHHMVIVKYLNKDKYDYKIIGIPLRFVQVLKNSNDNTEYKNILNKIVQSKLKGKSTDFRVILDNVMYGQLIQDGGQKFTLGSSTYKYNAKQLVINMDDIRILVDNRYFNSLSDDDASGEFIKIYNEILKVINARFDLFDINKFREKLNNGKEYFENLSIDEKNQVLLKMLSGLHCGSANVPIKELGLTTPLGKLQIPSGIVLSEDAIVIYQSPSGLFERKIRLKDI

SEQ ID NO: 1042 - protein, 1077 aa, Bacillus cytotoxicus
MKYSIGLDIGIASVGWAVINEDIERIEDLGVRIFDVAEQPKTGASLSTPRRLARSTRKRLRRRRHRVERVRKFMIQKGLLTQVQMEQLYDWKDGDLDIWLVRVNALERKLSDREFARILVHFAKNRGFQSNRKSELQEEDNGAVLSAVQENKRLMEEKGYQTISEMLLYDEKFEGTKRNKGGEYTHVVARSDLKREIQLIFEKQRAYGHAFATMENEDKFLQIWSSQRPFATKDDIAKKIGNCTFEPKEKRAPKSTYTFERFRALDKLNRLRILSGTSPARSLTQEERDLILNSLFSKKEVKYKELRKLLKLNDEQRFNEIFYDPNEKIEKNENRTFLSLESQYKIRKILQKIEGKSLNDTYRPVDLDTIAYALTVFKDDQDIRDYLQNQYVASNGKKELNLANRKYNDELIEELLHLSFTKFGHLSLKALRNILPFMEQGIPYHQACEKAGYQFNKKVNREKQKLLPPVPAKDIVNPVVIRSLSQVRKVINGIIKRYGSPSSIYIELAREMGRGYKERKDLEKQYNKNRQMNEGAKKHILELRPEFGDPRGHDILKYKLWQEQDCRCAYSFKSIPIKQLFEIGYAEVDHIIPYSRSFDDSNNNKVLVLAAENQNKQNRTPYEWFGHDETKWQEFTSLVTTMKVSKKKKSLLLKKNFDEEQAEEFRSRHLNDTRYITRYIKTFIEDNLQFRIEEGKKTYVHTVNGAYTSLMRKRWGFNKNRQENALHHALDAVIVAVSLPFKHKVRAYFKRREEYAHNQLKREGEFFPEPWPGFIHELEIRMMQDSENIKLAMESLNLKTYDESFIKELKPIFVSRMPKRAMKGQIHEETLKRVRGRTDDGYIRTVKKVKLDQIPFDKNGDFPMFGKETDMKTYEAIKSRYLESGKDKKKAFNTPLYKPAKNPENAPIIRSIKIEEKANRVVMLDEKTAADNASIVRTEVFRHKETGNYFLTPVYVADVLAKKVPDRLITTKKPYSEWRKITDEYEFLFSLYPNDLIRVKMPKEKETKTHTGEKHVWQENFMYFKGVHSGSAGVRMIDHMNSFEDEIGVRKLVVFEKYQVDPLGRMNKVHGEKRHGI

SEQ ID NO: 1043 - protein, 1038 aa, Actinobacillus capsulatus
MKLTPLNYILGLDLGIASVGWAVVEIDESGNIIRLIDLGVRTFDAAETGKGESLNLVRRSTRATRLLIYRKAQRVRELRYLLKNEGMIDDAIASYKLPNNVWELRVEGLDRKLNKEEWAAVLLHFVKHRGFKSSRKHQPKDGGKQGQLIKGINDNKILLASGVYRSPAELAIKKFYVEDGYIRNQRQYQHTFGREELAAECALLFETQRKLGNPFSSKEFESKWADIFNKQKKALTRKQMLAMVGICTFENTKYGLTEQKRAAKNTYSTERFVAIQRLQNLRIVENGEEKGLTDNEFQKILSLGYELEKGVSYARVRKELNLSEKAFFKGLQYSKYTKKTEDSLFLNFKFYHTLHNTLLSNNLENEWNEISKNDKLMDKIGTELSLCKNQDEFLESLSDELPKNVLNVLFENIHFDKFIHISLVALYKLLPLMEQGYNYAQAHTEIYGYSQIEDKKFLSAIPLADIHNPVVLRSLTQARKVINGIIRLYGSPTRIHIELSRDLGKSKVDRDAISKQNAKNRASNDELAKQIREEFQFEPKAKDILKYRLYIQQNCHCIYSNKKIDCKRLFEDNYVELDHALPLSRSWDDSFNNKVLVLKYENQNKRNLTPYEWLDGKNDSLQWRTFVARVNSFSEISKEKKQKLLSHNINEDEFKSRHLNDTRYIARYLKNHIEEHLMITGKGKNVLATNGRITSLLRKVWGLNKDRDLGDRHHALDAVVVACTQSKLIQQITEDIQHNRICRFTGEPKKKIFIPWEHFTADVNIRVFSDNPKLELENRLPDYPQYNHEFVQSLFVSRMPTRKMVGLGHEATLRSARILDTTGKSIKKEFLTDLTLKNLENMMNKEREPELYQSLVEHFKKYGDKPKEKFFKKGGTEVKSIRICKTQNKFVDLGNKTIADNGDIVRTDLFLKGKKYYFVNIYAWQVAEGILPNETTMGNLLDDSYIFQFSLFKNDILEIPHPEDKNKSVFAYFIRPDDDRRWILKFHDNAKIPEIYSKKDDTSIRLSVQGQKFIRKYQVDELGKNIRPCRPTKRQHVR

SEQ ID NO: 1044 - protein, 1072 aa, Anaeromusa acidaminophila
MNYTIGLDIGVASIGWAVIDNDNKRIVALNENLFDKAEDYKGKSKAEVRREKSSRSKTVRRKAHRLIRVRRLFVNTGLLTKDIVTNFHFHPSLLNKPNDLGKRTRKSPYQLRAEGLDRCLSNIEWAVVLFHLAKHRSFISVDTKDENAQKMKKAINENRSLLTMCAYRTVGEMYYKDDKFKEKCRNKGGEFTATINRQMLLDELTLLFEAQRSFGNQYSSVEFQQKYVTIFSSQRPTFTNSAIEKMVGYCTFEPHQKRAPKNSYTVERFNLLRDLSQLKYMIGIEEFFLTMEEKQAIIDLAYSKEKVTYSNIRTILNKKFKFPPNAIFKGHPIDKEQKNFTSLKGYHTLKKALSPLGANEWNVFSQNYRLLDQTVESIALGKNEANIIKRFKKIGLPPKYHSLLCNVSFSKFSHLSFKALNNILPLMESGMTYTAACANSKYKGHYIKNTQIQKTDPLILPLIPQTLFSNPVVFRALCKTRRIVQAIIKRYGLPYAIHLETARELSNSDEKKKEIEEQQNKNRKATEILVKELKEFGITTPKYSLIEKYRYYKEQDGICPYSGEPINLDMLLSDLYGSIYEIDHIIPYSLTQCNERSNKVLVKQSENQNKSNRLPIEYLGRDKERWDRFCTWVKGSRLSVRKKQTLLREPLTKEESECFRTRNLTDTQYAATAAAEYLKVGVTFSDKNNRKPIVLIKGAVTGFLRYNWGIKKDREKFLQHAQDAAVVAVASEKMLQQISEYYKLKETQPQLFYNKDNRPSFPMPWPFFNNELKARLSANPVEKIAAYKRIHKIPPVYYDEDISCYKPLYPSIAVRYKINGCLLDETAQSALPKYIKEGYTIKKIPLTELEPKHLIEDKDGIIPVVGADKDVAFREALLKRFTDIISIDEYYKKSLTEIKKISKQAFTEKFFKPSKPGRVPSLVKSIRIIDKGTAGHIKNNALYKNGTDSLFKVSIFKKNESYYFVPHYRLPALQKKEVLKAIVPKNSEENWIPIDETFHRCFSLYKNNLVRLITVRGEEHIGYYKGTHRRINAINLLSKETSFSITAPQIKYIELLFVSVLGDITRSKGDFS

SEQ ID NO: 1045 - protein, 1069 aa, Salsuginibacillus kocurii
MSDTIDYRIGLDIGTNSVGWSIVELEFNGEQYETVNLIDAGVRMFDKAEVPKTGASLAFPRRLARSTRRRLKRRANRKKAIRNLLINQDVVNEKELEKLFQSPTLIDVWSLRVEALDRLLGREEWARLLIHLAQKRGYKSNRKAEESTKEGKVVLSSINENTERLKRYRTVGEMWVEDPHFEGRFHNQENEYKFNVTRHQLEEEIRFLFKQQRELNSPYASNELEEHYLNIWGHQLPFTSGNSILNKVGQCSLLENEKRFPKATYTFQYFMVLDKLNRIRLKPSVRKLTQEERSHVINSLFNRSNIKKTPPKVKYKDIRKIIEIAEEETFHDVVYDTEKSITKNEDIPFVNLDSYYKIKKVCDEHKEEYGPADYDAVGYALTVYKTDHDIRLYLRNPENLAKRVFEEKFIQTLLLQSYSTFGHLSQKGIQAILPFMEEGMTYIEAAQQAGFNTTGFKKEGKSKFLKVIPDDIRNPVVMRSLTQSRKVVNAIIKEMEEQPQSIHVELARELSKDNDERKKISNQYEKNRKRNEGAVKILSENGILNPTGHDIVKYKLWSEQRGHCMYSLKPIPAEEFFAELKAERNRAPMLDVDHIIPYSKSFDDSYSNKVLVYSDQNRIKGDRLPVEYFDGDIDRWNEFIGFVNSCDFSKRKRTNLTKKRLNEEEEQLIKERHLNDTRYASRYFKNYLEEHLKFKVSEKKKDKKRVETVAGKITSHLRKRWGLVKHRQDTHLHHALDAVVVACTDTKIIQDVIRYYRLKEESRAESNIYFPLPWKTFRNDILHRLSLVAVPEQVKEALEGDQEQTEYMLVSRMPRRSITGAVHKETISTFGGYDEKGKVLMVQKVPLNEIKFDENGDFKMFNKESDPATYEVIKQRLLENNGDSNIAFEKPLYKPSKKGNGNEIKRVKVIKEQKTMMRQVNGGIAENGDLVRIDFFQKDKKYVMVPIYTWDTIEPVLPDKYVVGGKGYQQWPKITEDYHFSASIYPYELIRVVTKKGVDRFYYFSSLNIGKNVIKVIECNIPHQEYIEIGVNSITLLEKYEMNVLGKIKGVVQDSRNTFSNYKIKKHTQ

SEQ ID NO: 1046 - protein, 1096 aa, Corynebacterium caspium
MTRYVVGIDVGSYSVGMAAIELDEQGFPVQLLNAVSQLHDAGVDPDSQKSADSRLSKSGLARRTRRVIRRRRERLQKLDKFIAAQGWPIMSLEDYENPHHPWIVRAELATTKISDPAELQEKLSVALRHIARHRGWRNPYSSTASLLNVEKNSEPFEQILANIAEKTGKLIPENTTVGQAILIGIDRGYRIRKGAADGDAQTEGLLSAHLQQSDHARELAAIFAKQELSHDLYKDVIEVVFAAKSPKGSAARKVGKDSLPGQTHLPRALKASEAFQLYRIVSVIANLRLIVEGTARPLTKDERVAVYEYLSTAKSRNKASWDEVASILKVDRGQIRGTAAMTDDGERVSARPPIHDTNAIMGSLKLKALANFWKNSDSEIRAAVLRALSNSEARDDSSEADAQLDEFLADLSEKEQEELDKISLPVGRAAYSEDSLTRLTAVMLNEGVDLSTARQLEFGIPKNWQPPAPEIGEPVGNPAVDRVLKIVARWLAGVTKKWGEPERVTIEHVRDAFSSKKKTSEISRKINERAKRNESLRENIRKARGFDGYVSRADLWRYQSITRQNGQCAYCGTHITMSNSQMDHIVPRAGQGSTNTRDNLLAVCSACNSDKTNLPFAIWAAKTSRPNVSLKEAQERIKHWNKDPAMKALDFAYFKRSVLKRLKRKTIDEEIDTRSIESVAWMANELRSRIAHKYSLLEGQQESPKVQVFAGAITSEARKAAGIEKELKYIGGVGKTRLDRRHHAVDAAVVALITPFVAQTFEERMNLRFSEELSNSKSTWKTYTGADYAHRQQWEIWQLKMQKLLQLLQDALDNDQIPVMSNIRLRLGNSRVHEDKVSALEYHPLGEELSSSLIDRASSEALWCALTRDPDYVFKKGLPANPNRTIQVNGTHYGPSEEIGFFAVKAASIPLRGGYAELGKSIHHIRIYRINTGKMPTYAILRVYAVDLQRHRNNDLFNAEIRPQTISMRKAPDTLRKAIAAEAAEYIGWVVTDDELFIDSVLNTELNEAYGDVKRWRIVGSTDDNRFVLRPSQLSSEGLDSKASNNIQKIIKIGLRISVNELLKKHGITVVRRNALGVERIKSSANLPVSWSIKKI

SEQ ID NO: 1047 - protein, 1055 aa, Rodentibacter pneumotropicus
MQNNPLNYILGLDLGIASIGWAVVEIDEESSPIRLIDVGVRTFERAEVAKTGESLALSRRLARSSRRLIKRRAERLKKAKRLLKAEKILHSIDEKLPINVWQLRVKGLKEKLERQEWAAVLLHLSKHRGYLSQRKNEGKSDNKELGALLSGIASNHQMLQSSEYRTPAEIAVKKFQVEEGHIRNQRGSYTHTFSRLDLLAEMELLFQRQAELGNSYTSTTLLENLTALLMWQKPALAGDAILKMLGKCTFEPSEYKAAKNSYSAERFVWLTKLNNLRILENGTERALNDNERFALLEQPYEKSKLTYAQVRAMLALSDNAIFKGVRYLGEDKKTVESKTTLIEMKFYHQIRKTLGSAELKKEWNELKGNSDLLDEIGTAFSLYKTDDDICRYLEGKLPERVLNALLENLNFDKFIQLSLKALHQILPLMLQGQRYDEAVSAIYGDHYGKKSTETTRLLPTIPADEIRNPVVLRTLTQARKVINAVVRLYGSPARIHIETAREVGKSYQDRKKLEKQQEDNRKQRESAVKKFKEMFPHFVGEPKGKDILKMRLYELQQAKCLYSGKSLELHRLLEKGYVEVDHALPFSRTWDDSFNNKVLVLANENQNKGNLTPYEWLDGKNNSERWQHFVVRVQTSGFSYAKKQRILNHKLDEKGFIERNLNDTRYVARFLCNFIADNMLLVGKGKRNVFASNGQITALLRHRWGLQKVREQNDRHHALDAVVVACSTVAMQQKITRFVRYNEGNVFSGERIDRETGEIIPLHFPSPWAFFKENVEIRIFSENPKLELENRLPDYPQYNHEWVQPLFVSRMPTRKMTGQGHMETVKSAKRLNEGLSVLKVPLTQLKLSDLERMVNRDREIALYESLKARLEQFGNDPAKAFAEPFYKKGGALVKAVRLEQTQKSGVLVRDGNGVADNASMVRVDVFTKGGKYFLVPIYTWQVAKGILPNRAATQGKDENDWDIMDEMATFQFSLCQNDLIKLVTKKKTIFGYFNGLNRATSNINIKEHDLDKSKGKLGIYLEVGVKLAISLEKYQVDELGKNIRPCRPTKRQHVR

SEQ ID NO: 1048 - protein, 1127 aa, Streptococcus marimammalium
MNGKILGLDIGVASVGVGIIDSKTGKVLHASSRIFPSANADNNKDRRSARQARRLLRRKQHRVKRLKDLFDKYNLIQNDSISHSNVNPYEARVKGLSEKLTIDELYYALLNMLKHRGISYLDDAEDDGANSSSEYKKSIEENRKLLKSKTPGEIQLERLNNYGQLRGNFIVYNENNEKEHFINVFSTSDYKKEAQQILETQQKWHDNITNQFIEDFIKILTGKRKYYIGPGNESSRTDYGIYRTNGETLVNIFKILIGTCAYTGKVRAAKASYTAQEYNLLNDLNNLTYPTETGKLSQKQKEEIVIFARDNGATVKQLLKFICQLLSCDLNDIKGFRKDAKDNPEISTFEAHKKMKKGLETVDFTELTREEIDTLAHILTINTDKEAIEHAINMAINNNELPSWDNSQITELVQLRKTNSTLFGKGWHSFSIELMKEIIPELYATDKEQMSILSDNKYVSMKSKLMNRSQKTKYIDEEIVTDEIYNPVVAKSVRQTVKIINLAIKKYGEFDKIVIEMPRDKNEEEERKNIKKYQNDNNKEKDSALQEAASLYNGKDRLPHHVFNNYKDLNLRIRLWYQQEGRCLYTGQKINIQDLIDNRQNYEIDHILPLSLSFDDSISNKVLVTALSNQEKGQRTPFQAIREMKNAWTYPEFKKYVLNLKRIGKTKLNYLLTEEDINKIEVKKKFIARNLVDTRYASRVILNTLQDEFKRLKKETKIAVVRGKFTAHLRYQWRVEEKNRDTYHHHAIDALIIAASANLKLWKKMKDRLFDESEKQFVDMETGEIISIDNKEYKELVFQPPFQKFTDTLNSKELWESILFSYQVDSKVNRKVSDATIYGTRKAKIGKDKKDEDYVLGKIKDIYSLDGYDKFIKQYNKDKSKFLMYQKDPKTFENVLEVILRDYPDSKIDENGKKIKCNPFEEYRKENGLMRKWSKKENGPEIKQLKYYDTKLGNHIDITPDNSRNKVVLQSLNPWRTDVYFNPETMTYQLMGIRYSDLSYIKSDYGISIEKYNQIKKQEGIAENAEFKFTLYKNDLLLVKDTKTGEEMLVRFLSRTLPNKKNYVELKPYEKNKFDGNDKLISVLGVVSGSGRFLKSLAKPNLSLYKVKTNVLGNLFYIKKEELTLKF

SEQ ID NO: 1049 - protein, 1129 aa, Streptococcus orisratti
MTNGKILGLDIGIASVGVGVIEADTGKVVHASSRLFPSANADNNAERRGFRGGRRLIRRKKHRMKRVKDLFEEYKLETRFNNLNLNPYELRVRGLTEKLAPEELFAALKNLSKHRGISYLDDAEDDNASAKTNYAKSVLANKELLKTRTPGQIQWERFEKYGQIRGDFDIVTPEGEQQRIINVFSTTDYKKEAEQILETQALYYPQISSEFIEDFITILTSKRKYYHGPGNEKSRTDYGRYRTDGTTLDNIFDILVGKCGIYPDEYRAAKASYTAQEFNFLNDLNNLTLPTETKRLSTDQKKDLVRFATTAATLGPDKLLKEIARMVGCSKDDIKGYRIDNKEKPDLHTFEAYRAMTKLNTFDVATFSREMIDELARILTLNTDREGIEEAIVNDFPNLFSREQIDELIQFRKSKSQLFGKGWHSFSLKLMSELIPELYATSEEQMTILTRLNKMSPERKVTLRTKYINEQDATEEIYNPVVAKSVRQAIKIINECIKKWGEFDQIVIEMPRDKNEDDEKKRIADGQKANAKEKASATEFAASLYNGKKELPDEVFHGHKQLATKIRLWYQQDGKCLYTGQDISIHDLIHNQNQYEIDHIMPLSLSFDDSLSNKVLVLATANQEKGQQTPYQAIPKMKSAWSYREFKAFVLDCKRLSKKKREYLLTEEDIDKIEVRRKFIARNLVDTRYASRVVLTTLQDALEVMNKETKVSVVRGQFTSQLRRQWKIDKTRDTYHHHAIDALIIAASSQLKLWKKQDNPMFEEYEQGQKINLETGEILSDDDYKKLVFQSPYQGFVHTISSKSFEDEILFSYQIDSKVNRKISDATIYATRQAQLSRDRKKETYVLGKIKDIYSQTGYDAFRKRYDKDKTVFLMYQKDPLTWEKVIEVILRDYKEFDDKGKEVGNPFERYRQQNGLMTKYSRKNKGTPIKALKYYDNKLGNHVDVTPDDSKNPVVLQSINPWRADLYFNPKTAKYELLGLKYADLSFEKGTGNYTISQEKYDEIKKREGISAESEFKFTLYKNDLLLIKDIENGEEQVFRFLSRTMPNQKHYVELKPYDKAKFDGGQSLLTVLGTVAKGGQCLKSLNKVGISIYKVKTDVLGYQHFIKKEGNQPKLSFENSIKRHKNK

SEQ ID NO: 1050 - protein, 1406 aa, Streptococcus ovis
MAKFNQKYSIGLDIGVSSVGYAVVTEDHKVPSFKFRVFGETEKKYIKKNLIGSTIFESAEPAQDTRLFRTSSRRLERRNNRIKYLREIFKEEIDKVDKNFYRRLDETFRIVDDKSDDIRIKHPFFGKKDLEKEFHQQYPTIYHLRKYLADMPDTEEKADIREVYMALSHILKYRGNFLTTRDINPNNIDIKEKWKDFVLACQECFDMELPDGYEEFYTVLKEKLARKDKVKTMVSLFPKEESKKDTSVFKQLLHLLFGLSTKFKVCFELDEEPDLDFLKENYDEKLSELLCVISDDFSNVFACLKSFNDTLLLSDMLTHKGGTHARFSATMIDRYEEHRKDLQRLKSFVKQNLSEQDYLDIFGKKTEKGFVVDKEIRGYAGYINNKTKIDDFYSYLSNKIKMLEGADYFLDKIEHKTLLRKLRTVDNGAIPNQIHAYEFVKIIDRQGKNYPFLLENKEKLLKILTVRIPYFVGPLAQKDGSRFSWYVKNEAPNVLDSDDEDTKAGKIRPWNIDQLVNMNETRKEFINNLIGEDTVLLNKKVLPKRSLIYEELMLHNELTRVKYKNKYGKTDSFKSDVRKAIIKDLFKDTSKRVTVKQLVNYLQNCHDELKVVEIVAGVRQSFNASLKTYNDFKNIFSAQMLDSEEYQNELEEIVKIITVFEDKKSIKDYFKKNFSNFLSDEQIDQLSKLRYKGWGEYSQELLTNIRDEDTGFNLLQFVRTDDRNRNLQQLISDDKLSFKHKISEIQSQSLQSDTLSESIKEIAGSPALKRGILNSIKIVDELVDIIGYPPQKIVIEMARENMTTEEGKKKSKPRKTKLEQALKRMETDLLVDNGKNKGQLKYSNEELQSEKLYLYCLQNGKDMYSLDKDGNPETIDYNQLNQYEVDHIIPYSHLPIDSIDNKVLTRRINNQNKEANIPNKDIVRKMKPFWEQLYEAKLISQVKFQRLTTAERTPNGVLTEDMKAGFIERQLVETRQIIKHVARILDGRFESSKIVTLKSQLVSNFRNTFHLPKIRELNDYHHAHDAYLNVVIAQTLLKAYPKLAPELVYGQYRKFNRHEENKATVKKHLYSNVMKFFNSPETKVSKEVWSCSRDLPIIKKVLYKSQINFVKRTVIKKGGFFNQNPVGQNSTKLAPENLYPIKQGLNPSIYGGYGPLNSALSVLIIAEKMNNRTNKTKLVKELHDIDIIDYKRFNENPIDFLNSPEFLSKNDFSRVKNYIQIPKYSLVQQANGGKMMIESSTNLHKATQFKLTESQSELFYHMKRYLTKSNLMDLKDEMAVKESVNFIEQHSDEFDKLAEAIFNFSRKYLGETAGLKSLESGYNNRNFKDFQCNDEVVRYYYENFLKMFEFVKSGVSRDIKTYFSEKNSVARPRYKPNSKLLSATLIHQSITGLYETRIDLSKWGEE

SEQ ID NO: 1051 - protein, 1021 aa, Thioalkalivibrio sp.
MNTRLALDLGSSSIGWALFRLNDDSRPCAIIRSGVRIFSDGRDNYQNSLGARRRKKRLERRMRARRNKRVRTLARWLITLGFLPSDPVERRLLMNELDPYELRSRGVREELTRFEFGRAVFHLGKRRAFKSNRKTDTEDEKESNMKSAITTLEGELQKSGTTLGDWMYQQRKKDSSFSLRFRPNSSSSASKLDYDYYASRAMVEDEFRTLWIEQKKRSTHPEDFSDWAFDRIFDAIFFQRPLKPVVPGLCTLIPEERRAPKALPSFQRFRLYQELNHVRLVSADGARRPLSLGERDKLALYLENHKTLNILSIPRKLKLKDGSQAINLSGEDGSKKELTGNRTACDLRGNGKSKPGFGVAWDNFSDARQEEITKKLLNETDAESLSGWLVRNTGVSPDLAHTISERSLESGYSRVSEKAISLVLPKLMESVIPYSKAVEESEIGSHSGLSHYEKTGVLLEELPYYGEYLQRRTDGGTGDPRETNPEIRFGKIGNPSVHVALNQLRKVVNELVREYGRPTEINVEVLRDLRHGRKTKKKIHLANLENQKENQRRVEEALPFLGVKKVKSLSDHKRSSVARKMRLWEDLAKNPGDRRCPYTGTLIEPQMFLKTGEVEIDHILPLSDTWDNTLSNLTLCTREANRKKGKQTPYEAFGHIDEGPYSYASIKKRVKSIRDPEKRRRFLENALDVWKEDHSGPSSRALTDSSYIARVAVEYLSLICPREKVIPVSGRITSQIRKRFNFKKGRHDHRHHALDAIALGIADHRLVQQSARTSREADGRYMSLAKFIREPWPTYEEHAERAIRNIVVSFRPDHGHQGQIHKESHWGLRGDGSAKRKGANKPKTPNDVTRMMSISKSSDPLRIHTGSPAKSGTAYKFMETNSNYCLEITVNAKGKWSGEVISRAKSYEFMRDHPGGNIMDVLPKNKGINGRPLVMRLTQGDMVRIHVDGNKHIMRVNKMGWNGSVFLSEHFESNCDQRNRGKAEPGFRYLTKSASGLQAANCEWISVSPAGRTSSRWHAAA

SEQ ID NO: 1052 - protein, 1071 aa, Yoonia vestfoldensis
MRLGFDIGTNSIGWWLYATDGNEITGVIDGGVRIFSDGRDPKSKASLAVDRRGARAQRRRRDRYLRRKAALMKRMAAAGLMPADPVAAKALEQLDPYALRASGLDQELPLTHLGRALFHLNQRRGFKSNRKTDKGDNESGKIKDATARLDQAMIAKGARTYGEFLHMRRASAPDPKCVPTVRTRLSIAPRDNAEKAEAGYDFYPDRRHLFEEFTKLWAAQAANSPDILTDELRDEISVIIFHQRPLKTPEVGLCLFSGSHGVPQNDKRIPSAHPQNQRRILFETVNNLKVAARGELARGLTRDERDTIAHALDNKAHTKSLSGMSMKLKALGKLIKLRPEQSFTLETANRDSIVCDPVRASLSHPDRFGSRWSTLDAEAQWDLVQRIRAVQSDAEHNALVAWLIATHGLDRVHAENVANAPLPEGHGRLGMTATKRILAALEAEVIPYSAAVAACGWHHSDGRTGEVLTELPYYGQILDRHVIPGTYDENDDEVTRYGRITNPTVHIGLNQLRRLVNKIVTVYGKPDEIVVELARDLKLSEDQKRDVQRDIKKNTEAAITRGQKIEELGYANTGANRVMYRLWEELGPAIGPRCCPYSGKPISASMIFDGSCDVDHILPYSRTLEDGFSNRTLCLKEFNRQKTNKTPWEAWGNTPAWDAIEANLKNLPANKAWRFAPDAMERFEGENDFSARALKDTQYLSRIARSYLDALYDGADGKSHVWVVPGRLTEMLRRHWGLNSLLPDKDGAVKAKNRSDHRHHAIDAAVVAATDRSLVQRISKMAQRDEVNGAEEVARSVPPPWDDFRTDIKSQLDRIIVSHRADHGRIDFAARQTGNDSTSGALHEATALSIIDDQNVAVRIPLLSLSAAQFEEGGRSGWVRDPQLRGALHLATKGKDKKDFEAALLSFAAKPGPYHGISRVRIEKPLQDTARVYVPADAPIKAYQGGSNHRYEVWKLPDGKVLHHVVSMFVAHQGNLTRPHPAAKRIYQFMKGDLVRLEDSKFGPVIATVEKFNGKGMIELVPHNEANASDRYRKTKEDLYIRLGATTLLRAKARRVHVDEMGRLRDPGPPQ

SEQ ID NO: 1053 - protein, 1116 aa, Woodsholea maritima
MTEKYKPLLFAFDLGTNSIGYWVYALNSKGEPESSKGGGVRIFSDGRDPKSKASLAVARREARAMSRRRDRYIRRRKALLRTLSEYGLMPRDAKMRRALVQETGDIAQKSGGGSDGPYELRARALDEKLPLEYIGRAVFHLNQRRGFKSNRKTDRKDNDLGKIGAGVRDLEAQIMASDARTYGEWLAKRRRAGQTVRLRAGSDLLTAEGYAFYPSRALLEAEFKAIWAAQAQYYPDILTSEREKHVFDIIFYQRPLKPPQVGKCAFNPKETRLAKAHPVFQAFRLYKEVNELEIVLDDLSHQKLNRAQRDKLIWLLRQKKKLSFAKLRTELKLPRTTTFNKESETRKDLVGDEVYVLMADAKRFGGQWADFTLEEQWAILTKLKEEEDPERLLDWLQAHYKLDDDQAIAIIDAPLPQGYGRLGLTALSAMLDALKEDVIPEAEAAKRCGYNHSRLGFESEAGEDCLPPYQEVMERHIPPGSGDEDVVELELKDSLRDGLKEGPIPIGYDLYKGRITNPTVHIGLNQLRRLVNDLLVKHGKPQSMVLELARDLQMSEKQKTEYNKAQAKNRREAEARGSLLQEMGQRNNGSNRVLLKLWEELNPKDPEGRVCIYSGQAISASMLFSGEVDIDHILPWSRTLDDSKANLILCISAANRQKRNRAPAEVTEWQSHYDEILARAQILPKNKRWRFAADAMARFEGEEDFVARQLTDTQYLSRLAKEYLECLYPFEEADEHGELKKRNHVWVTPGRLTEMLRRNWGLNSLLGDQDHAEVAQPKNRQDHRHHAIDAAVIGVTTRALLKHISGLARTVDSQNFDYAIKKIIADNPPWPSFREDLKAALQPIVVSHKPDHGRVSQAGYKLGKGQTAGQLHNDTAYGPTQETDAKGNPIVVRRKAFNSLVAKDIPNVRDERLQAELYSAIEGLQKDKDIAEALAVFQKTHKQFKNIRRVRVAETLSTIPIRDSDGKVFKGFKGDSNYRYDVWETLDGKWHCEVVTMFDVHQRDWTSPFHKDHPTARRVLRLQQNDMVAYNHPDKGYCIARVVKFGGNGQIFFAPHNEANTDNRNRDKDDPFKFFSKTASGLKAIQCRQIRISPSGQIFDPGPQDQESKAQKRQIA

SEQ ID NO: 1054 - protein, 1427 aa, Empedobacter brevis
MAKNILGLDLGTNSIGWAFVKEATNSNEESSIEKIGVRVNPLTTDEQTNFEKGKPITTNAGRTLARSARRNLHRFKLRRENLLQILKTHKWIDNETILAENGNKTTFETFRLRALAAEKQLELHELVRVLFQINKKRGYKSSRKVNNAEEGSLIDGMEIAKKLCHENLTPGQYVLDLLKTGKKKVPDFYRSDLQTEFDRIWNFQKQFYNELFTDNLKEELKGKGKVATWTILKVPFNLVGLKRNLKRDELKLENYQWRNDTLSNQLNLEQIAIVLQEINGQLANSSGYLGAISDRSKELYFNNQTVGQYQYAQLQNNPHARLKNQVFYRQDYMDEFEKIWEIQAKNRENIFTNTLKEEIRDVVIFYQRKLKSQKGLISFCEFEQREIIKDEKKKTVGLRVIPKSVPLFQEFKIWQILHNIKLKNKITNEVVLLNENDKSFLFEELDLKGNLTASEVLKLLVDKPKDWEINYASLEGNRTNQALYNAYLTILDNEGYDVREELKLKLNKDDITLADIDKSASGIKEMVRAIFNHLGIKPEILDFNAELEGKAFEEQLSFQLWHLLYAYEEDNSPTGMDTLYRLLEQKFGFNKEQAKVMGTVAFQDDYGSLSSKAIRKIYPFIKENEYSVACDLAGYRHSKNSLTKEELENRELKSRLDILPKNSLRNPVVEKILNQMVNLVNTIIDIENDKLEKAGMKRNFQFDEIRIELARELKKNAKEREEMTKAMNAGKIKHEKIINILQVEDGIKFPTRNDIIRYKLYQELKNNGYKDLYTNQYIERKDIFTKKYDIEHIIPQSRLFDDSFSNKTLVPRQINLDKGNKTAYDYIFDVFGQDKLNEFLIRSKALFDLNDEGISKAKYKKLTMKGSEIGEGFIQRDLRDSQYIAKKAKEILFQITKSVLSTSGSVTDRLRDDWDLVNVMKELNLEKYRLAGLTEMQITKDGNPKEAIKDWTKRNDHRHHAMDALTVAFTKFSFIQYLNNLNARRNDKYDSISNAKDKKAIDTNSLRISSKDALGIEEKETHKINNGKGNYKRVFNEPIPNFRQLAKEHLEAVLVSHKAKNKVVTRNINKTKGSDKIQIALTPRGQMHDQTVYGWNRWSRVDLSKKLSKIEIEAIIDLKKRQFIKDFISEKGSISKAFTDENLAKLIFNNKSLKEIEISIPCYTQKIDLNKVLTDTQKTISAKKKVIKNILDLKVREKITERLVDYNGDFKKAFSDLDQNPIWLNEEKGIAIKRVTISGVKNAEALHTKKDHLGNDIFDEDGNKIPVDFVSTGNNHHVAIYEDEKGNLQDRVISFYEAVARINQGLPIVDKAYNHHLGWTFKFTMKQNEMFVFSSEDFNPNEIDLFDRKNQTLISKHLFRVQKFSKVEYGNSAVRDYVFRHHLESVISDVKELRDKTYKVFKSLGEFKGLIKVRTNHLGEIIHIGEY

SEQ ID NO: 1055 - protein, 1042 aa, Methylovulum miyakonense
MGKKVLGLDLGSNSIGWALLAEEDGKPNRIINIGSRIFIKAVEEKTPTPKNVKRRNARLTRRVLQRRAKRKLRMLKFLISLKLLPDDLQSSFTPEIELNAIGNPYPLRAKALDEPLTTYELGRVLLHLVQRRGFLSNRKTLLGDMADDPDVLAVLAELEDEEDNSTERAKEESAFKEQIKNFRNVIAAANCRTLGEYLATRDLHECQRNRSHDGGHLRTDRQMYHEELDKIWEKQQNYHTVLTDDAKKQIDHIIFYQRPLKLRADRIGKCSLEPKRTRANIARLESQRFRYWQDINNLQYFENHTDQWLSLNEAQKTKLAQLFEHQASISFAGIRKALGFDKTIEFNLERGSKKLKGNITACEICRVFPAWDSFNDDQQHALVEDLLTIQKKSVLKNRLEKHWHIPPDIAVQLCLLEFEPGHSNLSVKAINALLPFLQQGQIFSDARVSAGYGYERQEIIPLAKLPAPPETANPIVNKGLHELKRLINAIIAEYGKPDAIRIEMARDLEMNTKRYAEHDKQQKANTKANDEATNKFQEMRQQNPHLQLRNYPGKTDKIKYRLWKDQDQRCAYSGKAINLSTLFGAEIEIDHILPYSESLDDSYMNKVVCYNQENRFKGQKTPIDAFGKDESKWNQITQALKRWDRRLQSKKNRFVMTAADVQKRDFISSQLNDTRYISRVALDYVKQLGADVSVSKGITTAWVRHQWGLNNLLGEGDAKDRSDHRHHAIDAVVIACVDRRFYTALVGIAKDLERKQSQLNMKDIHIDPLWPSLREDLQQALSQVIVAHAPQLKLSGELHEVTGAGFIEGIGNVNRKNLDGNFTQVDKIYDAAVKEQVEQHLKRFGNKPKEAFAEGNVVLHKDGKTPIKRVRIVQSKTTLAKLEKSKFGARDKQGKVFKWLAYGNLHHVEILRDKQSGKYSGEFVTMMEASHRAKGIGKPKQPIAKNDHGEGFEFVMALHINDIVSIENGGQRVFYRVQNLDSHNKRMQLRLHTAASSKTQDKAKDKARDQATTLPDKDSTIPALMALGLQKHKLNILGKVIA

SEQ ID NO: 1056 - protein, 1080 aa, Methylocystis sp.
MRVLGLDGGIASIGWALIEIFEDHEPSDGRIIDTGAWMFDAPEEKSQTGTKLKSELRRIFRGQRRVIRRRRQRMNEVRRILHRHGLLSSDNRDALKQPGLDPWKIRAEGIDRLLSPIEFAVALGHIARHRGFKSNSKGAKTSDLDAESSRMKKAVGETREKLARFGSPAKLLVEDEGFVLRQTKLKSGALETVRRFRNRDGDYSRSLLRDDLAAEVRALFRAQARLQSTFAKVELEAEFTQAAFFQRPLQDSERLVGPCPFEPAEKRSPKRGYSFELFRFLSRLNHLTLREGSEERTLTVEELRTAAADFGGVAKFTFSTLRKRLALPDIAIFVGIKADDEKKLDVVARSGEAATGTARLRRVVIDALGELAWGALISAPERLDKITEIITFRSDLDRIRAGLIEAGFDTPLIEAIVRAAADGKLDAFTGVGHISAKAARNIIPGLMRGMTYDKACAAAGYDHTASRERDAFDVGMHGKEALKKILQEERISRELVGSPSARKALIEAVKQVKAIIEKYGVPDRIHVELARDVGKSIEERRDIHFGIEKRSRQKDKLRELFGKEVGHLPQDGERGKEELLRFELWNEQMGRCLYTDEYINPKQLVASDNSVQVDHILPWSRFGDDSYLNKTLCTAKANQDKKGRTPYEWFRADKPEAEWDAFVARVESIQFMKGLKKRNYKLKNAEEAAEKFRSRNLNDTRWTCRLLAEALKQLYPKGEKDKDGKERRRVFTRPGALTNRLRRAWSLQRRKKSEKGERIADDRHHALDAIIVAATTESLLIRATREVQDIERKGLHYDLTKNITQPWPGFADEALDAVEKVFVARAERRRARGKAHDATIRHIAVRDDEAKVYERKKVGDIKLGDLIRVKDAERNAPLIENLRKWIEAGSPRDNPPLSPKGDPVSKVRLVTKNKVNITLDTGNPERLATVDRGEMARVDVFRKANRKGKYEYYLVPIYPHEIATMETPPMRAVQGGGDDDKWPEIDSTFEFLWSINQLSLLELTKPDGEVIRSYFRSLDRNTGALTVSGIANSTATRKGIGTRTLIDFKKLHVDRLGQIFEVERELRTWRGETWRGKDCI

SEQ ID NO: 1057 - protein, 1146 aa, Hugenholtzia roseola
MNQKGYFVLGLDVGTNSLGWALLDLVSQKIIAASVAVFAAGKNKTPTGKEESRNAVRRLKRGMRRQFFRRRQRKAALLEALQILGWIEKDLPKQGKAWEKWLALCPYQLRAEALERKLTLEELARVFYNLALKRGFKSNRKALSEEEGSKKEEDTETKKTTKKAKSDKKEDAKPSMEEMLGATRKALAEGGFQTLGQYLYSLQKIESPQAAGLKPKIRGNHRAERKLYQEEFDRIWQAQVGFFAAQEIDLNQHSRFEDVIEKVVAGRFQNEVRSKGLAYLFKEYLVFFQRPLKSSRHLIGKCTLFPTKKRAAMSHPLYQKFRIWDKLAHIRLTGAGMQNEPLSMDDRHKIVQKLETVEKQTIKQILKLIDKSDYQTNFKETDIVMGNKTALKMRKIFDPPKPAAKNAKNRKERNQLFGIVPQSEEADFYQSWDSFSEEEQIEIWNAIENIAQDNEWLAEYARKKWQLSEERIQILKKTHFEAPYGRLSVKALRQILPYMENEGMDFSNACAAIGLSHSEGIGAQNQDFLGEVPNLRNPLVQRSLSVIKKVVNEIIKKYGKPNEIHIELARELKLPLQAREKIDKQNRDRAAEHERIKDTLQNDFKIISPSRQDIIKYKLWKECDETCPYTGDKIRKSELFSHTYEVEHIIPYSRSLDDSFGNKTLCRTDFNRKKANLTPYEMKEKGLIKAPEYEAMLERVRNFKPFSAKKFQRFTKNITDFTEGFENRQLTDTAYIGTETRKYMLQIAEKETDVILTNGGTTAELRRLWGFNSILKDEETDEKKRDDHRHHLIDAIVIALTNRSLIKRLADENQVSDKLKALLSTKDQDKRFSYPKGWESLRHEVKEVAENALVYHHFRKRKRGTLHDDSLYGRAYLPFSGKPKEDEKGQPYYTIRKKVEALTIPELSKIADKTIRLMVFQKLEEGGISKEVLDNLKEIDKRENTLRKKLKKESPPNYEERAEPKTTMERIKEVLQNLSLPSKNPYFQSVPIKKLRIQNPENTFVFVKGRKAYVAPNGNHHLCIIEKADGKRRAEMITRFAANTRKGETFAPPPLAKGEKLLMTLMLNELLLVESPALSLEGLDLETANKQLLNQHLYRVKKMSGVTITMRHYLSAKDDSTVFSKSSNELKARKVRISPTGEISWA

SEQ ID NO: 1058 - protein, 1120 aa, Propionimicrobium lymphophilum
MSHEIDYKVGIDVGTNSVGFCALQVDANGMPVKLLSSMVKIHDSGVDPEKVKSAVTRLASAGFARRTRRLYRRRKKRLAELDRKLVELGMPIIDLESLPDPYAPWKARLLLVQEKLEASEQKRELSIALRHIARHRGWKNPYERIESLYHVQEDSDLFEDLKKRVSEKTGAVFVGGETLPEVLSHVGFNASERLRSAPSVKYGQRSLIDGENVEGETKDGIIGGKLMQSDNANEIHKIAQVQEIPDEIVKTLIDLVFKAESPKGSASKRVKKDSLPGQNNKPRAEKAHLSFQRFRIVSVIANMRLIDPENGELRKLNAAEKSKLIDFLMLPDDSDGITWGDVAEILDVPRECLQGTSKLAPEGERASSFPPVNVTHSRVTKCGVKPIVEWWEEANFEEKNALITLLSNADELDPDVPGADSANKLMESLSDKQLENLDKIKLPAGRAAYSIDSLDRLTEKMISDSLELHKARKAEFGVPDDWRPPSDPIGEPVGNPAVDRVLKAVNRWLLAAEREWGAPLSVNIEHARSGFTSESQVREYERDLKRRRERNQRVVSEANRKLGSQMVERRSDITRYVSVRRQNCQCAYCGEPITYQSCEMDHIVPRKGPGSTNTRDNLVAVCVRCNRAKTNIPFAVWVESTTIPSVSVKEAIARVRYWIKDEGLTLKQQRNFQNDVINRLKKKSADEEIDNRSIESVAWMANELHARVKGHFESVGAETKVTVFRGAITAEARKATGFEGKVNLIDGHVKTRFDRRHHAMDAAVISLMRPSVAKTLAERSNIKQSQRITRRAEDWKNYRGRDEGSRNIFDRWSRQMDQMLVLFNIALAEDAIPVTQDVRLRVGNGRAHDDTIRPLAAKRVGDSWTLQEIDRAATEQMWCALTQQSDFDPVEGLPENQLRKVRVKNIFYEANDELRILPKQIAAIPVRNGYAEIGNTIHHARIYKFGSKKPKYGMIRVFTHDLLKNKSDDVFTVELKPSSVSMRNAESSVRKAVLKGEAEYLGWLVTGSELELDLSDSYFSQKAIGELLKDFPETNRWVVSGFDSNKQLKLRPRLLAAEGSEKVALNDGSKVIICDKGWRPSVNLLFSKASFLRKICRPALGRERTKSDSGLPISVTLKES

SEQ ID NO: 1059 - protein, 1347 aa, Streptococcus plurextorum
MQKTYSIGLDIGTNSVGFSVVTDDYKVPSKKMKVNGNTDKKYLKKNLLGTLLFDSGETAAGTRMRRTTRRRYVRRNNRLRYLQEIFADQMEQIDPNFFHRLKESFLDEEDKQFEQHPIFGTLAEEVAYHQQFPTIYHLRKHLADSKEQVDLRLVYMALAHIIKYRGHFLIEGGLESQAVGIQQLFDEFVQVYDSVFEGSDLVSIHAEVEPILVDKLSKSVKKDRVMQLFPTEKSNGNFAEFMKLIVGNQADFKKVFSLDEKAVLQLSKDTYEEELADLLGKVGDDYLDLFHAAKRLYDAVLLAGIITSQDIATKAPLSASMVQRYEEHQSDLKALKKHIPNYKPDERKLYKEMFNDSTKNGYAGYIEGGVKQEEFYKYTKALLSEIENSQYFIDKIEREDFLRKQRTFDNGAIPHQIHLQELKAIVRRQGEHYPFLKEEQHKIEALLTFRIPYYVGPLARGNSRFAWAVRKSNEKITPWNFEEIIDKEESARKFIERMTNVDLYLPDEKVLPKHSFLYEKFAVFNELTKVKYITEQGKEEFFDCHLKREIFEQVFKNSRKVKKKDLLNFLDKEFEEFRIVDITGLDSEKQEFNASLGTYHDLKKILDKDFLDDVANEHLLEELILTLTLFEDREMIRKRLSKYSEALTKEQLKKLERRHYTGWGRLSAKLLNGIRHKATNKTILDYLMDDGQINRNFMQLIHDDGLDFKTIISEAQVIGERDDLKAIVDDIAGSPAIKKGILQSLKVVEELVSIMGHNPESIIIEMARENQTTQKGRKNSQQRLTGLTNSIRELGSDILKEFPVDNSQLQNDRLYLYYLQNGKDMYTGETLNIDQLSHYDIDHIIPQSFIKDDSLDNRVLTSSKSNRGKSDSVPSQEIVQKMKPFWKKLRDAQLISKRKFDNLTKSERGGLSQEDKAGFIKRQLVETRQITKHVARILDERFNQKRDDNNKLIRDVKIITLKSNLVSQFRKEFELYKIRELNDYHHAHDAYLNAVVGKALLAKYPQLEAEFVFGDYPKYNSYKERMTATQKVLFYSNILNFLKDGNKHGNEDGEVIWDPNYHLPMIKKVLSYPQVNIVKKTEIQTGGFSKESILPKGDSDKLIRRKNNWDPKKYGGFDSPTVAYSVLVIADVAKGKAQKLKTVKELVGITIMERSAFEKNPIVFLESKGYQNIQEKNIIKLPKYSLFELEEGRRRLLASAIELQKGNQLVLSQEQINLLYHAQRVKNLEQPEHLRYVEEHKAEFEVILNTLLIAAERYILKPKVIEMIKKALESNQLDITQYAESFVNLLKFTAFGAPGGFKCFGIEIKQANLRYQTVTECLNATLIHQYVTGLYETRIDLSKLGGE

SEQ ID NO: 1060 - protein, 1203 aa, Rubritepida flocculans
MAGQQGGGRLLFGAMVAKVQDPRAQREGQGALHPRDAQPAPVWTTCFACGKRPANQTSHRPHQASLHDGFITPFEAAFQGGPLMQIVWGFDLGVTSVGFAVIRWDGWATAEGAGEILRLGVRMFPEAREIDTQGPGDPLNAARRQKRLMRRQIRRRRWRRVHLRAVLAEAGLLPGADAAPPPGQDPYALRARGLKDGLAAEEAGWAIFHLLKRRGFQGSRKVGPAEADVSPGAEQAARGHRRGSDASPSDPADRRAQEDAEAQARGAALAARLAGRTLSAYLQSDDHLKPAGTAPPAWEIPRRRGVGQTRPMVREEFEALWAEQAKHHPDLLTPELKSRIETAALAQQPTFFRARTIGEDDLEPGEPRALKAEWLTQRFEMLQLVNALRLERGNQRPLDPAERASAIAYLESVRRPTWAGLRAAIGIGRSDRFTHERSEKSTLRGNATEAALRAALGAAWDALPEQTRKTIRAEIGRAWHRIEYRPLKGGAIFAIRDHLDIAKERATLAARARGEWGLPAEAAEALARIDLPDGAARHSLKAMRRLLPHLEAGLSYMTALEREYGARRESGPPLQRLPVPNRAELARIEDAWVRERMAALLAGIRNPTVLRTLGELRKVVNTLLRAHGRPDVIRLEFARDLKQSVEERRATDKRQRDRERARRAAREEVARLGKPADGPEGEENVLRWLLWREQGGRCPYSGEQIGCAGALDASATQIDHIFPVSRSFDDSQANKVLCLAGENAAKGRRAPFEWLSPDGDRWNHLTSIVWPSMEQAGWPAAKRRRCLKPSLEDPLADEVGFTNRQLVDTAFIARAARPYLGLLFGGGQNGIDAVQPVPGRATALLRRAWGIGLGRLIGGASEDGPKVRDDLRHHAVDALAVALTTPRTVAELSRWWQARESGLRPPGFRLPWPGFRYEVKAAVEAILVSHRVQAKLSGPLHEDTRLGDTGLREASGSAIYVKRKPVAELSASEILSTPQYGRDAWIADGGVRQAILDHLSASGLTLERRERGTVPDQAAARRLRALLAQEIRLKLTEEARKRWAERGVAAERGPVIRRVRLHIRRKEGIMRVHAEKNIHAELGPGSNDHIAIYRDGETVRFLVATKREALMRVQRGEPTVLLEHPQGGRLVMALRPRDVLSREENGIREFVLVRKVNAAGRIFYKPLYSANEPRPEVSLGPSFVKDGWQKVSVDPIGRWRPAR

SEQ ID NO: 1061 - protein, 1512 aa, Flavobacterium filum
MAKILGLDLGTNSIGWAIVEYYKENNIQFKLQDKGVLVFDAGVLKDDKGKYKSKTSERTNFRGIRKLKLRLKVRKYETLKVLIENEMCPLEMQQLDVWKKSNFTIYPCSETFLDWLKTDDKSHKNPYYLRNKATKEKLSNYDLGRVFYHLAQRRGFLSNRLDKTDDSKIDNLKEKLKIYVEESDLTTLKLEFENQFIDFELEGRKDLDPTETKIKNIKSKIYKIINNKDIKYSEIDTVKKEINDYLNKPETSGPVKKGIKELDTLLEENKFDTIGQYFYSIYNKEFNIVKEGEKELIVKNAKIRNHYTGRKEHYLKEFNIICQKQEIDKKIKDALIKAIFFQKPLKSQKGMVGYCNFQINKRRCSLSRPEFEEFRMLQFVNNIKIKTPVDEKLRKLTDEEIIKVKKQFYRKTKPTFDFKDLVDELIPKDKTAIYFKNKEAKTAEYLVNYKLNATVSGCPTISNLISIFGQEWKSFEVVTDKLNSKGKYIKYNYIDVWHAWQTFTDAKKLESFASEKLKLDNVKAAKFSSVSLKTGYSDLSLSAIEKINKYLAKGLLYSHAVFMANIENVIKDEFWNDLNKRKEIEFEIGSIIDTYSLEKKYSNAVNDLLSKYYEDKENRVYYSKEAKQIFRKDLWSKFEDVFGRKAWNNNDDKDEYFEYYFNLMLKNLELRKRIKIETLEEKVKNYLLSFEYCDENDLKKLYHPSAIEKFKAKLLKDYDGKAYKDENGNDLLGLGSPLNTSIKNPMAMKSVHQLRKLINTLLIEGKIDKSTIIHVETARELNDNNKRKAIEEYQKERENLRAIYKQKIEELYFKETGSTINPNDDDILKFQFALEQREDKKIVTKEEILKYELWKEQNHICLYTGKTIRLSDFLGENPKYDIEHTLPRSLSQDNSMENKTLADAKFNRDKKKQLLPCELDNSEDVLLRIGHWKNRYISLDKEIEILKKKGSRITDKDKKDKNIQERHKLKMEYNYWYGKYNRFVMQDITDGFKNSQKVDVGLITRFAQNYLKSCFEKVYSVKGTMTDEFRKLWAKDVFYKEENGKLEKNRDNHTHHCKDAVVIACITKDKYDLLAKYWEKEDENKKEEAKEIIRNTIPWKGFAHDLKEIEETVLVKHIKKDVMKVTTYKKLRKKGKLLHIPEYVKDENGEIKLDANNKKIKVTYKHPETGKEIIVYQKDNEGKPLPIIQKSDSARGSLHKQSFIGAVAKRMLDENGKPLQINGKYILQKDSKGNVEKLYVMRKEITKLNASDIEKIVDSNIKMIIQKAVDNKILKFKKEGATIEKDCIIWQNEEKKIPIHKVRLFVKDTPIEIKQQPKQNLQTNKANRKIHKHLIYAQNDDNYMIALYKDDKHKDFEIVNNLDYINLKKENQGFYPTSKIKKVRGKEVIIPIINRNKKDLILKKGQIVIFLEKGEVINDLNTISLLEQRIYKIEGISRQYDKKNDNEYGVLNFKKYDEARKSDTAKKDDYSEDGEFKLNENKPTRKMSHNQFNAFVEGIDFMITPIGKIQKL

SEQ ID NO: 1062 - protein, 1232 aa, Rikenella microfusus
MAKVLGLDAGTNSLGWAIVEETETGYILEDKGVHIFQEGVARDKNNEKPAVQDRTDARALRRRYFRRRLRKIELLRVLVRYGLCPPLTEEQLEAWREKKRYPLDAAFLRWQRTDDNAERNPYHDRYRALTETLDLSDERHRHALGRALYHLAQRRGFLSNRKEAGNGKEEGAVQSGIENLSAEMEKAGCRYLGEYFYQLYRRKEKIRKRYTSRNKHYLAEFNAICERQRLPEEWRKALHRAIFFQRPLKSQKGSVGKCTFERKKSRCPVSHPRFEEFRMRSFINNIRLTAPGDDTPRPLTRLETETILPLFLRKSKPHFDFEEIARRIAGKGQYGCQGDRNEAPYRFNFARTATVSGCPVTASLIALFGDDWLPEICRLYRLGEGKSEEQVLNDIWHALFSFDDEERLRAWAADKLRLADEQAKAFAAIRLPQDYAALSLNAINKILPYLRRGYRYDEAVFLANLKAVLPPATYADETRRLRIERDIAELTLESRREPYVKYDSKERRIDDYLTDQGVPPARLNRLYHPSMIETYRAARPDAQGLLLLGSPRTASIRNPMAMRALFRLRTLVNRLLREGKIDPDTKIRIEFARGLNDANQRKAIEQYQREREAENRKYADEIRAQYAAETGLTIEPSEDDILKYRLWEEQKHVCPYTGKQIRVSDFIGSAPGFDIEHTLPRARGGDDSQMNKTLCESRFNRESKRTKLPAELSNRAEILERIESFGWREKVESLQKQIEAQFRKGRNAPTKEERDSAIQRRHYLRMQRDYWRGKYERFAMTEIPEGFSNRQGVDIGIIGKYARLYLKTVFRRIYIVKGSTTDAFRKMWGLQEEYARKERINHVHHCIDAITIACIGPKEYDRWARYAADEERYRYGAGARPRFDKPWPTFTEDVKAVADELLVSHHTPDNMAKQTRKKLRVRGRVKLDAAGRPICQQGDTARGRLHQDTFYGAIRHQDKLRYVIRKSIGDLQPADVEKIVDETVKARIKEAIGEVGFKTAMNPDEHTIWMNREKGVPIRRVRIFANITQPLPWDKMQRDLSVHEYKRRYHVANDGNYCMAIYEGTDSKGRTKRSFEIVNLLDAAGYFKASADRTARPDLVPRTNANGHPLKYLLKTGTMVLFYENSPAELYDCPPKELAKRLYKVTKMAKNGQTAFMFHQEARNDDKLKTDYAEKFGTTAPKALTNGYSSVDYQQPHPKLLLSPSSFDMYVEGYDFELTVTGQIIFKHETPC

SEQ ID NO: 1063 - protein, 1399 aa, Chryseobacterium tenax
MTKNILGLDLGVSSIGWAYVQEDDKNSANNKIIKLGVRVNPLTVDEQINFEKGKPITTNAGRTLARGARRNLQRFKLRRANVIDVLTKGNILKDGDLLTEVGKNSTFQTQELRAKSAKEKIELSDFVRVLLLINKKRGYKSSRKAKNEDEGQIIDGMAVAKKLYEESLTPGEYSYQLLIEGKKQLPDFYRSDLQSEFDKVWKFQKQFYSEILIDELYKELQAKNKNATWAILKEPFSLVGIKQMGTMQEKKIEKYLWRSEAAKKQLDFESLAVVFQEINSNLNNSSGYLGAISDRSKELYFNHMTVGEYLYQQLKANPHTKLKNQVFYRQDYLDEFEKIWETQSQYHSELTKELKEQVRDVVIFYQRKLKSQKGLISICEFENREIEIIENGKTKKKTVGLKVAPKSSPLFQEFKIWQVLNNLQFQNLETKEIFPIDLDFKQSIFDEVNVKGRLSAKEVLDIVGYSGKEWKTNFKDIEGNNTNENLYTAFLKIIANEGKEFPKEFKLTIEDDIKVTKIHSSASKIKEFVKENFSSLGINTSILDFNPEFDGKDFEKQSSYQLWHLLYSYEGDDSASGNEKLYELLEKKFSFKKEHSKILAEIGFSPDYGSLSSKAMRKICTYIKEHKYSDACNLAGYNHSKNSLTKEQLANRILKEKLEILPKNSLRNPVVEKILNQMINVVNEVSKEYGRPDEIRIELARELKKNAEERANMTSEIGKATLLHQKYAEILQKEYGIKVPSRNDIIRYKLYLELANNGFKDLYTGQKIEKENIFTDKYDIDHIIPQSRFFDDSFSNKVLVPRGANLKKGNATAFDYLEMEGKDQLEKFLNTIKDLFDKSLISKAKFEKLQKKGSEIGDGFIQRDLRDTQYIAKKAKEILFEITNSVVSTSGRITDKLREDWNLVNTMKELNLDKYRKLGLTETVINSKGEEKERITDWSKRNDHRHHAMDALTVAFTTHNHIQYLNHLNARKDEKHNQHIIISNIENLITKVYEKKNGSTKRKFVEPIHNFRIEAKKHLDEILISHKTKNKVVTKNINKTKKKGGVVAKVVLTPRGQLHKETIYGSSKFLKTKEEKVSGKFDLETINKVQNEKFRIALLERLKEFNGDSKKAFTGKNVLAKNPIYLNEEKTEQVSESVILAWYEKAYTIRKAVNSDNFKDYKNLEKVIDNGVKEILKNRLDAFKGNAKEAFSDLEKNPIWLNESKGIAIKTVTITGINNAETLHYKKDHFGKEILDENGKRIAVDFVSTGNNHHVAIYEDADGNLQERVVSFYEAVERVNQGLSIIDKEYNSGLGWKFLFTMKQNEMFLFPSEDFNPKENDLFDEKNLSLISKNMFRVQKFGELSKSGFWFRHHLETSVELKKELRSTSYLDFYSKDFMKTIVKVRLNHLGKIVQIGEY

SEQ ID NO: 1064 - protein, 1064 aa, Veillonella magna
MKYILGLDIGITSVGYGIINEQYEVITSGVRLFSEGTAAENVIRRTSRGIRRRIRRRRHRLDRMKQLLCTILNIGTIHFETDIYNIRKKGLYERLSPSELAAAILHLTKRRGIHYLTAEDLEENNTSGQTTKDIVDGNTKQLKDKYVCEVQLERLAAGQSVRGIENKYLDVSYKKELEALLDKQSNFYPELEANRDILISIYESRRDYEEGPGGENSPTPYGRYRYDKEGKIQTVNLIDLMRGHCTYYPEELRIAKNSYTACLFNLLNDLNNLKIDGSRKLTYEEKKELIDTIVNRGKNINLTQIAKICNVVKDTISGYRVDKNDKPLFTKFEGYQELYNICKTLGCINIIEGNRNLVDTISDVLTKVKDLDEREHQLIVMGLEKSIAHALAGAKKFKEYHSLSKKAMEVILNDLWRTDKNQMVLFLERGLSPRQELDVTSNEIKFSMENWIVSPVTKRSVNEAIKVINALRKWLKKKEGQSAEFSDIVIELAREKNSADAANREKRNQKNQEDKKKKLANLAPSRHLTKKQMDMLLLLDEQDRKCAYSLRPIDIQDVFTEGMLEIDHVIPRAKSLCDAMYNKVVVYSSENQNKGKRTPFQYFCSGKATINYDTFKEWVIGNNRFSKRKKACLLYEQDPDKDLEGFINRNLVDTRYASRKIMNVLQYFFKCHGFPTKVKSINGAMTFAFRNQARLSKDRLNTYAHHAQDALIVAGFANTNIVKKLDRFLPQARVINENGIEEYVDVSTGEALSDNDFYSPEYIQFIKYISNITALRPKYSHKVDRKPNRQLYDANIKSTRVVQDEKEENTFYITKYSNIYDNGPGNNGSKLKAMILNSPEKLLMYRYDKKTFDKFLEVVDYFKDESNPFYAYYKEYGEKLRKYAKKDNGPVINDVKFLDKKLVSHRVNGKQQGKNKSVYLKIKSWRADIYKSGEKYKLINVTYDMLIPTHGKLETTYTINKDMYERALIAKNLKEEDFCFSIYSGEKLSFTKNGEEQTWIFSCVNRDSTNRIEVKYVDKPSPGNTQKYRMIAIGAVSNFKKYTTDVLGNDYPVSKEYIKYTVKI

SEQ ID NO: 1065 - protein, 1075 aa, Azospirillum halopraeferens
MQPYRLSLDLGTNSLGWCVLDLDHDGQPRGVRRLGVRIFTDGRNPQDKSSLAVARRLARQMRRRRDRTVVRRTRLMAALIRFGLMPADRAARKALERLDPLALRARGVDERLDPHEIGRALFHINRRRGFKSVRGTGDPEEAGKIRPAIGRLEARMADTGAPTLGAFFAWLRANGHSVRARPVGRGARAEFPFYPARPMLEAEFDALWAAQAPHHPGLLTEEARATLRRRIFHQRPLKPPPVGKCSLIPEDRRAPRALPSAQRFRLLSELANLRIIAPDRSERPLSMEERDAILRAARAKPAKKAISFKDIRKVLKLGSEVEFSHESARRPELATDETAAVLSDKRRFGPRWARLTPAEQDEIVERLLSEPEEGALIDWLIARPGLEPEAAARVADAPLPDFHMSIGRRALAALLPVMETHAVDGRPIRYDEAVPVAFPGLHHSDRRPGGRLNALPYYGAVLDRHVAFGTGDPKDPVEKRLGRLANPTVHIGLNQVRTVVNALIDRYGRPQEIVVELARPLKQTAEARRKADKEQADNQKKNEARKELLRRAGASVNGRNLMKLRLWEEQGSGVARRCPYTGRTIGLELLLSEKVDIDHILPFSQSLDDSAANKVVCLTEANREKRNRTPYDAFHHDPARWAVILGCVEDLPPNKRWRFAADAMQRWDADGGFLARQITDTQYLARLAREYLRHVCHPDRVRVSPGRLTALLRRRWGIDSILRDHNRDGGEAPADGAVIKNRNNHLHHALDAAVIGCIDQGLVQRVAQAAQRAEDQGLDRLMDDLDPPWPGFRDELAARVRAVTVSHKPEHGTGGRLHEDTAYGPTTESERAEGFNLVFRKPLDGLSEREVARIRDPLLRRAMQDRVAFHRAGPERLDVKQAVIRAAEDLAATEPWVGVRHVRLLTKEAAPIWLAGPDGEPYKGLIAGDVHHIDVVALPDGRWAGRAVTLFDARRTALPDGRAAPCVPAPGERFVMRLHKGDLMKLEHDGRERIMRVARLEPANNRLRMAEHSEAGELDKRHADPDDPFRWLIISFDVLRRRRARRVTADPLGRVRDPGFPKWAVEPGPDGEAVA

SEQ ID NO: 1066 - protein, 1395 aa, Lactobacillus jensenii
MKEIKDYIIGLDIGTNSCGYVVTDKQNNILKLKGKTAIGARLFKEGQAAADRRSFRTTRRRLARRHWRLGLLEEIFDPEMEKIDPNFFRRLKESDYSPKDSRKQFNAIVFKSIKADKRFYKKYPTIYHLRNALMHDNQKHDLREIFMAVHHIVKYRGNFLREDSVNAFKAAKFSLRGEDGIGPVDKLNDLLKEIYSEYSPELATNNLSKIEDIIKDKNLYKQDKLKQVATLLIKEADSKDKAKLNKDIAKQVANSFMGYMFRLDTLFSLTDVDVKDYKLKFSDANIDESLDDLTSLLTDAQIEFVLELQSIYNTIVLNEIVPDGMSLSESMIKKYDDHKEDLKIFKEYIDSLSDQKKAKKLLSAYNLYVNYRKSDLVEAKNLFKNKKVGDKNFADVISNFEVFGKFVSDNLDDSELANKIKARLDLGEFLPKQRTNQNGVIPYQLHQVELTQILEKQGKYYPFLITPNPVESHRNNAPYEISELVSFRVPYYVGPLIDNQSIKDKQNKNKFAWMVRQKQGQITPWNLEEMVDTTESANQFIKRMTRKDTYLLAEDVLPKSSLVYQKFMILDELNRIKIDGKKLTSELKHDIFEKLFKKQKSINLDNLKNYLLVEGNIPGLIEGLSDGINFNNSFSTYIDYRNIFGDEIDNPNKQADFEKMIEWSTVFEDRKIFKRKLKEITWLTSEQIKQVSSKRYSGWGRLSKKLLTQITDENGVNILQRLWNEPETLTEVLANPVIKRKIVEANSSFTKAKDMKDILVEAYTSPQNKKAIRQVMRVVDDIIAAAHGKKPSQIAIEFAREDQDNPQMTKSRKAQLDQIYAKISDEFLDDAVKNELKNMKDNKPLAKDKVFLYFKQMGRDAYSGEKLSLDNLQDYDIDHIYPQSFIKDDSFDNRVLVQRAYNNGKSDNVPVLLFGNKIAAGLGITIRQMWKKWLELGLISKRKFNNLITDPEKISRNMASGFVNRQLVETSQVIKLVANILQAKLPDTEIIEVKASYNSILRKEFNLYKSREVNDYHHAIDAYLTTIVGNYLYQVYPKLRPYFVYGQFKKFGKAENQEDDPVKKIKKFNFIYQLIWGKDDAICISHTNQQVFSKKDIIDKLTTAYNFKYMNISHAVYTRNNNMFKQTLFPIIERTTAKTKSLIPKKLDRPTDIYGGYSNNNDAYLALVKVDKKRGSEYRVVGIPMRAAAMLKASKNYDEDLRKVIEPMVMFDKNGKAKRGIEGFRVLVGKMPFKQAVLDGNKKFMLTGTVDTPNLKQLVLSQQNMKYILDYIEDVDCRKHKFGDKVQNPDKCLLEVFDEIIEIVDKYFELFDSRDFREKLRNSRNKFIKLEASKKADTILAILKGLQAKSTRATIKELNISDFGRIITSSISPEAQLIYQSPTGLFERRVKVKDL

SEQ ID NO: 1067 - protein, 1066 aa, Desulfovibrio termitidis
MQQVPYILGLDLGAASIGWALLAAGNDGEPVGVLRSGVRLFEMGCAGDMDKFQRGKEESPNAARRAARQMRRQHRRKARRRQRILVLMQKYGLLPPGNVRDTNARNAFFNTLDAALLDQWLNRHAASCSPAEAERLSCDPDFLHVFPYRLRADGLTRPLSAHEFGRAVYQLAQRRGFLSNRRTEAEEDEELGKVKTSINGLQAEMDAAGAETLGQYLAGLAPSVSRIRGRYTSRDMLTQEFDLLWERQRALHPAPYPAHLREAARNALCDAIFYQRPLKVQANLVGFCELEPGERRAPKYADEAQEFRLLQRLNDLVWYDKQLVPHRLADNPEQYARLRDAMLRADSMTFPAMRKLLGLPQDSRFNLEEGGEKKLFGHRVNARMHAVFGDAWDDFAPEKRAAILHDIISMDDARALCGRGRRAWGLSEEKAVQFARPLPEKGYASHSLKALRTLLPAMRAGESYGTVRPCLYPPRYGDAPQDTLPPALEAMSTLRNPVVLRCLTELRKVVNAIVREHGKPVVIRVELARDMKRSRKERTDYSARNRKQESQREKMAERLMSPEAGNARIATPRRNDVEKLLLAEECGWQCPYTGRMIGWNDLFGPHPQFDVEHILPYSRCFDDSFLNKTLCHAPENRAHKRGRTPHEAYAADPERMDAILRRVEAFQGDAATCRAKLARFRAPTMQEWKDFADRQLNDTRHASVLACKYLGLLYGPQSNRYVQASRGGITAMLRGLWGLNRLLGDGGKNRGDHRHHAVDAIAVAATSRGMVQALQRAAAQAESGRVNRLVPRDMVPLPFEGFMEQADNVVLSILPSHRVSRRVRGALHNETIYARRELPDGAVGYAVRKRLDDVGKGKPVGQDAANTFTAKLLDPGLAPSVALLLTGSVPRRDDDGSPPPVRSVRVLQTGTPVSVGKDGRLCQTASNHHAPVYAVPGKKGEEWVCPGVVSLLEAMQRKEAWKKSEGGPVVDRQGPEGARFLFTLSSGECIRVRVDGRDEYLRVRSVYMEQGVLKVEAVRLQDARPKKEIGKKREGGFFKLSLKQLQQGDCEKVVITPLGTVVPCRD

SEQ ID NO: 1068 - protein, 1134 aa, Methylophilus sp.
MNSKQGVKYSIGLDIGIASVGWALLGEHRVIDLGVRCFDKAETADKGESLNLARRSARLLRRRLRRRAWRLTKLARLFKREGLIADVNVLKQPPAKGFATPNLWQLRVEALDRKLSAEEWARVIYHLCKHRGFHWQSKAEEKKADDDKEGGAVKKGLAGTKKLMQDKGYRSAAEMVINEFPDAQRNKRGDYSKALSRELLSSELHMLFESQRTFGNPNTSSEFENKLLESKHGLLWAQKPSLSGEALLNMLGKCTLEKNEYRAPKGSFTVERHVWLTRLNNCRLIIDGEKRALTPAERALAINLPYDQSSDFSYKQLRNALVKAGLTSEFRFAGLVYPSQSEQEKSKNPEDEKLIKLPAWQQLRKAMKEANLESDWQKIAVDALDGKAQLYDGIARILSVYKEDDEVERELNKLDLPNKPDMVAVLQTFRFEQFSNLSLKALYNILPHMEKGQRYDEACLAAGYHHSQQHVISTGEYRYLPPFYSGRDKDGRLKFNEELDIPRNPVVLRALNQARKVVNAIIKKYGSPDQVHIEMARDLSKSFDDRRDIKKAQDEYRDRNEKDRSTFNLEFNTTGELKGREFEKWQLYREQHGKCAYSLQALDMNRLFEMGYAEVDHALPYSRSYDDSKSNRVLVLAAENRNKGNMTPYEYLGGAQNNVRWIEYVAFVNSNKTYRQAKRNRLLRKDFGEEAAKEFSERNLNDTRYICRFFKNYVELYLKLADESDAKRCVVVNGQLTSFLRARWGLVKVRSDSDRHHALDAAIVAACSHSMVKRLANYSRRKELEAAREGFVDLTTGEIANHAMYAQLEQHFPFPWSHFRQELQARLFADDLQAMRNELENMGYDADALDHAKTLFVSRAPQRRNGGAAHKETIYGQSEKLATTGSVTQKIVVTDLKLSDLDKLVEPHRNQKLYAEIAEWLKGKDEREKRVKEIETSLGRGKDKREMTAEEKAEVERLRALPRKPTNDGSPGPVVRTVTAVIDKLSGIPIRGGVAKNDSMLRVDVFSKAGKFYLVPVYVHHRVTGLPNRAILQAKDEAEWTLIDESFAFKFTLYPNDYVCLIQKGKSPLYGYYAGCDRTTGNIDLWSHDRNRLIGKDGLLRSLGVKTAISLEKYNVDVLGNIYPAPKETRSDLA

SEQ ID NO: 1069 - protein, 1513 aa, Asinibacterium sp.
MNKKILGLDLGTNSIGWALILQDFENKQGEILGIGSRIIPMDQGTLGKFAEGSSISQTAERTSFRNARRLRERYLLRRERLHRVLNILNFLPEHYVSQIDFEKHLGKFKEETELKLTYKNKEFIFKTSFDEMLADFRQHQPHVLVNEKGKPKLVPYDWAIYYLRKKALSKKIEKEELAWILLNFNQKRGYYQLRGEEEGDNPNKKIEFHSLKIIDVIADEIQKDKTDIWYSLILEHGWIYRRQSKTPLFDWKDKIRDFIVTTDLNNDGSIKTDKEGKEKRSFRAPGEDDWTLLKKKTEQEIDQSGKTVGAFIYDTLLQNPNQKIKGKLVRTIERKFYKEELRRILEKQIELQPELFTSDLYSDCIRELYRNNESQQSSLSKRDFVHLFINDIIFYQRPLRSQKSSISNCSLEFRNFKDENGNKQKQYLKAIPKSNPYYQEFRIWQWMYNLSVYKKDDDTNVSKEFLSSIGDMENLFDFLNNRKEIEQKPLIKYLLEQKGLKGKLLNAEVEKFRWNYVEDKQYPCNETATLIREKLTKIKGISENFLTRGIEQSFWHLVYSVTDKHDYEKALKSFAAKHSLDEDSFVDIFRKFPPFKSEYGSFSEKAIKKLLPLLRVGKYWNWDTIDKEVQIRIDHIIDAEANDEIRQIVKEKADKHQLRARSDFQGLPLWLAQYIVYNRHSEADISEKWNSAKDLEDYLKSFRQHSLRNPIVEQVITETLRVVKDIWVKYGNGTKDFFNEIHIELGREMKNTAADRKGITNQITENENTNLRIKSLLAELKNDPQVENVRPYSPMQQEILKIFEEGVLNADIEIEEDILKISKTAQPSSSDLKRYKLWLEQKYRSPYTGEMIPLNKLFTPEYEIEHIIPQSRYFDDSFSNKVICEAAVNKLKDNQIGLEFIKNHHGEKVLIGMDKVVQVLEVEDYEDFVKQHYAKNRSKRNKLLMEDIPEKMIERQMNDTRYISKFISNLLSNIVRSESNDDGVNSKNIIPGNGKITTELKQDWGLNDVWNELILPRFERMNQLMNTTHFTTWNENHQKLLPAVPLDLSKGFSKKRIDHRHHAMDALVIACATREHVNYMNNEHALRKGKTKEEKQTIRYDLRTKLCDKKHNKDSDQNYEWIFKKPWASFTADAKSALEHIVVSFKQNLRVINKATNYYEKWVDKNGIKVKELQEQKGTNWAIRKSMHKDTISGLVKLKKKKTVSLNVSLDAIADIVDEGLKKEIQKLQKVGWDKKKLSKHFKDLNYKWNEKDISKVEIYYWEKDNVASRVPLNDTFDEDRIKDTITDTGIQKILLNHLKNYKGQSDKKGKEIPAQLLAFSPEGIEEMNKNIMMLNGGKFHQPILKVRTYEPKGNKFNVGQTGNKKVKFVEAAKGTNLFFAIYTDENGNRTYETIPLNIIIERQKQGLSSVPLQNETGEKLLFQFSPNDLVYVSSENDKQSNIQPTFDSRCIYKVVSFTNNRLYAIPHIVAKSIVDKNEFTQLNKLETSLDGLSIKEHCYKLKTDRLGNISKL

SEQ ID NO: 1070 - protein, 1247 aa, Alkaliflexus imshenetskii
MKKILGLDLGAASIGWAIISEEIETDKTRVEILGMGSRIIPYEGTEGKDFAKGTGESRNALRTKARTIRKGYDRYQLRRKYLVEELIKNQMYPDDVLRHLPKLQLWELRSEAVHSPVSLKELGRLMLWLNQKRGYKSSRSDANLGKKDTDYVAVVKSRHENIKELNYSIGQFFYKELLADNSYKVKENIFPREAYIEEFDAICKTQQVAHSNVLTNELIKKIRDEIIYYQRPLKSQKGLVSVCEFEGFWRKGKDEKEYFVGPKVAPKSSPLFQLAKIWENINNIKIGSRTGGEINITNEQKRAIFQHLDNNDKLTSSDLLKILKLKKDECYVNKQLTKGLTGNITKHAIRQCLGDLAAKYDNLLKLELDINVLPNEGYLYDRKTGEVLGSKPILVIDPKVEYEPLYQLWHTIYSINDKDECSRVLQLKFNIEKSVADQLAAIDFTKHAFGNKSAKVIRKILPYLMDGDGYTDAMSYAGYNHSASQTKEENLQRQLLDYLKPIQKNSLRQPIVEKILNQMVNVVNSIIEKYGKPDEIRIELARELKQSKEERNDADKSMSKRQRENEFIAKRLEEYGLRATRNNIIKWRLYEEMDNQDKKLNAICVYCGQPISLTQAIRGDEVDIEHIIPKSKLFDDSQSNKTLAHRHCNKTKNDLTAYDFMKSKPEAVFNEYVVRVNYLYANHIINKSKRDKLLMTESKIPDNFIDRQLRESQYIAKKAREILQTICYNVWSTSGTVTAELRHLWGWDDVTMNLQIDKYRELGLTHFVEWESDHGKNKHQKEVITDWTKRDDHRHHAVDALTIACTKQGYIQRFNTLSASKTREDMFAEIEKRSLEFKEKRSLLEKYIIGEQPFSVLDVEKAVASILVSFKAGKKVAVWGKRKAGKRGNKKVVQDRIIVPRGALSEQFVYGKIKRQEPDRPIKYIFENPHLIFKPKIKAKVEERLSIFDGDVRKALASLKNDPVYLDENKEVVLEKATCWKDEYVLKYPVDINFNKIDKVVDTKIKKILQNRLLKFGEKEKEAFKDVQLEDKTIIKWYEHEGLERPIKSVRCFTGLAAVVPVKKDENGKDIGFVKPGNNHHIAIYTNAEQNKHQHISTFWHAVERKKYGIPVIIKNTNEVWDLIQSKPEGTYPTSFLEMLPPPNFKLLVSMQQNEMFLLNMPEELKENLDLNKKSTLSNYLYLVWSLSDNDYWFRHHLETKNSELKSVVGAKESNRFYRFKSLSSFFSTNPIKVRLNNLGDIIGVVQ

SEQ ID NO: 1071 - protein, 1483 aa, Prevotella sp.
MKTILGLDLGTNSIGWAKVIVDDNENYLRDIQLGSRIIPMSQDVLGKFDKGVTESQTAIRTNFRGIRRLRERTLQRRERLHRVLHTLHCLPPHYDSAIGWDRKTPTTYGKFLNHGEPKLAWERRGDGTMQFLFMDAFHEMIADFAKYQPALVANGKKVPLDWTIYYLRKKALTQPIKKEELAWILLNFNQKRGYYQLRGEEDEENAAKHEEYHELKVVGVEADEAGKGDNTWYNVKLENGWIYRRQSKIPLNDWVGKVRPFIVTTEYEKDGTTPKKDKEGNVKHSFRSPDEKDWGLRKKQTEHSLEASGTPVGAFIYDHLLKEPSDKIRGKFIHTIERKYYKQELTGILREQSKHHEELRSKDMLKACVEELYPNNPLHRESLLKKDMPYLLIEDLIFYQRPLKSKKSLIAECPYEAYSYVDKETGEMKRQGIKCIAKSNPYYQEFRLWQFIANLRLRNRADDRNVTAEYLPHQEDYVRLFTYLNDRKEINQETLLKDFFKLKKVTIGGEKVFPIRWNYIEDKEKKYPCNATRHELLFALDRAGIEHNWLNDRDLAYRLWHLLYSVDSKDETERALRKLKDDDAFVESFLKIKPFEKEYGAYSEKAIKKLLPVMRRGSLWNEADLCPSTKERIANILQGTIDEKLKKKIGVFISSCQQVSDFQGLPEWLACYVVYGRRSEATDIQRWETPEQLLDYIHKFKQYSLRNPIVEQCILETLRTVYDIWKEAGHIDEIHVELGREMKKTAEQRAHLTEKVLRNENTNLRIKSLLMELKNNADIKDVRPHSPMQQEILRIYEEGALQTLSKEDAAFTEITKISKMAQPSASELKRYRLWLEQKYRSPYTGKPIALSKLFTSAYQIEHIIPKKRYFDDSFSNKVICEAEVNREKGSMLAYEFIKKRGGDVIHCTTLGDVTILSEAEYKALVTELYANNTSKKEKLLMEDIPQEFVNRQLNDSRYISRVVMTLLSNIVRIEGEEETTSKFVIPCSGGITDKLKKDWGLNDVWNNIVYPRFERLNALTNTTDFGQWENKEGKRVFQTSVPLELQRGYQKKRIDHRHHAMDALVIACASRNIINYLNNKEANDPTKQENARKQLCIKNRIIRKPWETFTQDAYKALDNIVVSFKNYVRVINKATNYYERYNANGKKVVDEQKGEAMWAIRKPMHQGTAYGHVNLRRKAVVKLKDALENIPTICDKTLRHYIQDLQKKHFNTKQLLAHFKSINYRLNKQAVDKVEVWQYSDDKEKLAATRKPLDTSFDAKRIATITDTGIQKILLNYLQAKGGDPAIAFTPEGIAEMNQNIAIYNEGKQHQPILKVRIAKPMGKKFPIGQTGNKAFQYVIAEEGTNLYFAIYEDEEGNRTYDTIALREVVERLKQGLTPVPEKSEKGVALKFYLSPNDLVYVPTADELLSKACSLDKNRIYKMVSATMNRCLFLPHRVAKTIYDKVEFEALNKMERALTGEMIKPICWKMEVDRLGHIVNIIK

SEQ ID NO: 1072 - protein, 1082 aa, Clostridium beijerinckii
MMKEDVNYRLGLDIGITSVGWSVINLDKKRIEDLGVRIFNAAENSKDGASLALPRRLARGRRRLFRRKSYRVDRVKKLLMEANILITDKNILIREEREKFFAEFFKKCKTKSGLDVWEARVKALDEKVTNEEWAKILINLCKKRGFKSNRKNEANDKETGQVLSSIKSNEEKMKSLQARSVGEYIYKEVNLSNDSYKGFRNKVGQYNMCVSRAMLMDEIITLFARQRELGADFASEEIEKKYLEIFNSQRPYSRFEDLEKMIGFCTFEKKNKIKRASKNSISAEEFVLYENLNKLSIVNKGDKRKLTSEERNLAICEAYKKNEIKYTGLRKLLNLNDEERFSTLSYSNKVEIAKTENTKFVSLKGYHEVRKAIETNLGKDRWLEIKDDRNMLNDIVYVLSIAKTDEEIEKQLNLREISEDIIKSVSDLSFSKFINLSITAIEKIMPYLKEGYQYNEACDKAGYDFKAVYEGTKLIKLPKIGIDEIVNPVVNRALAQTRKVINAVIDEYGSPIGINVELARELAKNFKDRKTIEKEQKENRDNREKLRNQLKDLMGKEPTGAEILKYRLWSQQKEECAYTQERISIEKLFEPGEYEIDHIIPFSRSFDDSMNNKGLVKGTENQRKGNRLPYEYFGEDEERWHNFEIWVEDSNLHPKKKYNLLKKKFSKEEQREFKERNLNDTKYICSYISNFIANRLIFKESESKKKVITINGRATAYLRAKWGLTKVREDGDKHHALDATVVAVATQGMVQEISKYSKAKELNYIRQGDDFVDIDTGEIVVLEDYRYLLKDRLPRPWLGFSEELITRLSDDPAEELKKSPIKTYDEDFIKNTVRPIFVSRVPYRKIGGKLFKETIYSPKAFQGKTFVTKRNLTELTPKDIDNIYNYQTDKKLYDAIKCKLIEHNGNAKKAFEEEFRKPTKDGKLGPVVRSIKINATVPFKDGIDLNGGKVAKEGIVRVDIYEKCGKYYSVPVYRNEIAKGIIPKKAALAASDESNWTVMDESYNFKFSVYKNDLVEIIYEKKRGYFGYFDGFDRSTASFTIESNDSSERYRGIGIKTGVKEINKYQVDVLGRYYKVKKEDKN

SEQ ID NO: 1073 - protein, 1231 aa, Prevotella loescheii
MITRILGLDTGTNSLAWAVVDRDANGNYTLVKRGDVIFTEGVKIEKGIESSKAAERTAHKALRVHYSRRRLHKIDTLKVLVELDLCPYLSNEQLNLWKAKKTYPLTDDFMLWQRSGSAEENNPYYCRHRCLTQKLDLTDQSQRFLLGRAFYHLAQRRGFLSNRLDTSADSDESGKVKSGIAELSVEMEKAGCEFLGEYFYQLYKQHGNTIKLRSRYTDREEHYKKEFLAICEKQELDPKWVEALQRAIYFQRPLKSQRKGVGKCTFEPKKPRCAESHPDYEAFRMLCFLNNVKIQTPNDTSLRPLNEDEREKIWPLFFRKSKPNFDFEDIAKALAGKNNYAWYKDAGEKPFKFNYRMQQGVSGCPVTAQLIDIFGSDWQTAIAETYTAVEKKNGTKTIDEMADDVWNVLYSFSSKDKLKAFATEKLQLDEASATKFANAKLPHGFASLSLKAIRNILPFLRQGFIYAHAVHLAKIPDIVTKAVWNDADKREMILSGLMEIIENYNPKDRGVEGTIDFCIKSHLQDVIDLRPGAADALYHPSMIETYPDAKLNKMGVFQLGSPRTNAIRNPMAMRSLHILRSVVNQLLRDGIIDRNTEVHVEYARELNDANKRKAIADYQREQEKKRKQYRDDIIALYKSECHKEIEPTDTDILKFQLWEEQDHLCLYTGTQIGICDFLGDNPKFDIEHTVPRSVGGDSTQMNLTLCDATFNRQVKGAQLPSQLSNHADILVRIDHWKSKCEDLRKQLDKIRTYGGMEKAMKDRLIQKRHRLKMDLDYWQGKYSRFTMTEVPEGFSRRQGAGIGLVSKYAGLFLKSLFHNEQNPNKSNVYVVKGVTTAEFRRMWGLQGEYEKKSRLNHCHHCIDAITIACIGKAEYDKMAQYYHDEELFQWRGTTTKPHFNKPWPTFTEDVLAIEQSLLVKHLTKDNMPKQAKKRVRTATGKYLAQGDTARGSLHKDTYYGAIEQDGEIRYVLRKPLNKFENEAELEKIVDQAVKEKIKEAIAGKNFKTAITEPIFMNKEKGIRINKVRYYVKAQERLKIRQQRDLSSKEYKQFFCVENESNYLLAIYEGELKGKKERDFCVVNNLESAACLKRSNKGKAAPLVPERSEERNLPLLAVLKRGTQVLFYENSPEEILFDNPQDLVRRLYKVTGINTKKDVKNGKTYLYGNIELRFHQNAQKKDDVKMQSGVYKNNEVLRQGIVLSHKQFKALVEGVDFEFNVLGEIKKKERHA

SEQ ID NO: 1074 - protein, 1344 aa, Kandleria vitulina
MSQNNNKIYNIGLDIGDASVGWAVVDEHYNLLKRHGKHMWGSRLFTQANTAVERRSSRSTRRRYNKRRERIRLLREIMEDMVLDVDPTFFIRLANVSFLDQEDKKDYLKENYHSNYNLFIDKDFNDKTYYDKYPTIYHLRKHLCESKEKEDPRLIYLALHHIVKYRGNFLYEGQKFSMDVSNIEDKMIDVLRQFNEINLFEYVEDRKKIDEVLNVLKEPLSKKHKAEKAFALFDTTKDNKAAYKELCAALAGNKFNVTKMLKEAELHDEDEKDISFKFSDATFDDAFVEKQPLLGDCVEFIDLLHDIYSWVELQNILGSAHTSEPSISAAMIQRYEDHKNDLKLLKDVIRKYLPKKYFEVFRDEKSKKNNYCNYINHPSKTPVDEFYKYIKKLIEKIDDPDVKTILNKIELESFMLKQNSRTNGAVPYQMQLDELNKILENQSVYYSDLKDNEDKIRSILTFRIPYYFGPLNITKDRQFDWIIKKEGKENERILPWNANEIVDVDKTADEFIKRMRNFCTYFPDEPVMAKNSLTVSKYEVLNEINKLRINDHLIKRDMKDKMLHTLFMDHKSISANAMKKWLVKNQYFSNTDDIKIEGFQKENACSTSLTPWIDFTKIFGKINESNYDFIEKIIYDVTVFEDKKILRRRLKKEYDLDEEKIKKILKLKYSGWSRLSKKLLSGIKTKYKDSTRTPETVLEVMERTNMNLMQVINDEKLGFKKTIDDANSTSVSGKFSYAEVQELAGSPAIKRGIWQALLIVDEIKKIMKHEPAHVYIEFARNEDEKERKDSFVNQMLKLYKDYDFEDETEKEANKHLKGEDAKSKIRSERLKLYYTQMGKCMYTGKSLDIDRLDTYQVDHIVPQSLLKDDSIDNKVLVLSSENQRKLDDLVIPSSIRNKMYGFWEKLFNNKIISPKKFYSLIKTEFNEKDQERFINRQIVETRQITKHVAQIIDNHYENTKVVTVRADLSHQFRERYHIYKNRDINDFHHAHDAYIATILGTYIGHRFESLDAKYIYGEYKRIFRNQKNKGKEMKKNNDGFILNSMRNIYADKDTGEIVWDPNYIDRIKKCFYYKDCFVTKKLEENNGTFFNVTVLPNDTNSDKDNTLATVPVNKYRSNVNKYGGFSGVNSFIVAIKGKKKKGKKVIEVNKLTGIPLMYKNADEEIKINYLKQAEDLEEVQIGKEILKNQLIEKDGGLYYIVAPTEIINAKQLILNESQTKLVCEIYKAMKYKNYDNLDSEKIIDLYRLLINKMELYYPEYRKQLVKKFEDRYEQLKVISIEEKCNIIKQILATLHCNSSIGKIMYSDFKISTTIGRLNGRTISLDDISFIAESPTGMYSKKYKL

SEQ ID NO: 1075 - protein, 1399 aa, Chryseobacterium sp.
MNKNILGLDLGVSSIGWAYVHEDSKNFENNKIIKLGVRVNPLTVDEQLNFEKGRPITTNAGRTLARSARRNLQRFKLRRSCLIDVLKKNNILSETDLLAEVGKNSTFQTQELRAKATKEKVELSEFARVLLLINKKRGYKSSRKVKNDEDGQIIDGMTVAKKLYQENLTPGQYSYRLLQEGKKQLPDFYRSDLRSEFDKVWNFQKQFHPDIFKEELYTDLQGKNKNSTWAILQEPFSLVGIKQTGTAQEKKTEKYFWRNEAVKKQLDFESLAVVFQEINSNLNNSSGYLGAISDRSKELYFNNQTVGEYLFQQLKANPHTKLKNQVFYRQDYLDEFEIIWDTQSKYHKELTKGVKEEVRDIIIFYQRKLKSQKGLISICEFENREIAITENGRTKKKTVGLKVAPKSSPLFQEFKIWQILNNLQFQNVETKEAFPIDLDFKQSIFNEVNIKGKLSSKDILDIVGYSSKEWKTNIKDVEGNYTNENLYDAFLRIIVNDGIEFPKEFKLTIDDDIKISKLNVSAEVIKLFLEEKLSELGINTSILDFNPELEGNDFEKQASYQLWHLLYSYEGDDSASGNEKLYELLNKKYGFKEEHSKILAQISFPQDYGNLSSKAMRKIYPYIKEHKYSEACNYAGYNHSKNSLTKEQLENRVLKEQLDILAKNSLRNPVVEKILNQMVNLVNEIIKEYGRPDEIRIELARELKLSAEERANITSEINKTTIQHQKYAEILKKEFNILVPSRNDIIRYKLYMELANNGFKDLYTDLKIERENLFTEKYDIDHIIPQSRFFDDSFSNKVLVPRGANLKKGNFTAFDYLEIEGKEKVEKFLSIIKDLYDKGAITKAKYEKLQKKSSEIGDGFIERDLRNTQYIAKKAKEMLFEITNSVVSTSGRITDKLREDWNLVNTMKELNLEKYRKLGLTETVINSKGEEKQRIIDWTKRNDHRHHAMDALTVAFTTHNHIQYLNYLNARKDEKHKQHQNIFAIEKLITKVFEKKNGSKERRFIEPIKNFRIAAKKHLDEILVSYKAKNKVVTKNINKIKKKGSLIVKTELTPRGQLHKETIYGSSKFLKTKEEKVSGKFDVQTISKVQNEKFRNALLDRLQEFNGDPKKAFTGKNIISKIPIYLNDERTEQLPETVTLAWYETGYTIRKAVNPDNFKDYKNLEKIIDKRIRNILIERLKEFKGNSKEAFTDLEKNPIWLNKTKGIPIKTVTISGINNAEALHYKKDQLGNHILDEHGKKIASDFVSTGNNHHVAIYEDEKGNLQERVVSFYEAVERVNQGLTITDKDYNIDLGWKFLFTMKQNEMFLFPSEDFNPKETDLFDEKKLFLISKNLYRVQKFGELSKSGFWFRHHLETSVEVKKELRNYSYLDFYSKDFMKTVVKVRLNHLGKIVQVGEY

SEQ ID NO: 1076 - protein, 1088 aa, Listeria fleischmanni
MKKLVLGLDIGVASVGWGIIDAENGDVLDAGVRLFSSRDASENESRRTSRRQSRRLSRRKKHRRERIKQLLLAHDMDVCDIVNENPYQLRVKGLNEKLEISEIYVALTHLAKRRGVSYLDDVVEEGGAIKSEHLNKNMEEIKSGKMPCEIQLERFEKYGQVRGMIEINQDTEESSFLVNIFRTSDYIKEAKTILATQQKFHKQITNEFIDEYINIMASKRDYFIGPGNEKSRTDYGVYRTNGDTWDNLFEILIGKCSVFPEETRAARSSYVAQEFNLLNDLNNLKISSLESGKLSTSQKHDIVEKVKNSKKFGTKDLLKYIASVCECKIENIDGCRKDKNRKPIMHTFENYRKVHNALNEAGVDLRLSEADYDELMKIMTLNSETLEIKKQCKEKLPHLTEDYLNVCLVLNKKGAFSGWHALSLKAMKLMMPELYGTSKNQMQIIHTMQLGKAYIKPLNQQKYLNSEAILEEIYNPIAARSIRQTIKVTNAILKKYGPLDSVIIEMPRDYQTSEDERKMIEKMQKENEKEKKAALKRAREEYPFPDEAFRNHKELATKLRLWYQQDQFCVYSGRKISVVDLVRNPNQFEIDHIIPQSVSLDDSLNNKVLCFSEENQKKGQQTPFYYHKGKSGNWTYEQYKLFVEKLFDKKKISNKKRELLLFEEDINKWDVRRGFIARNLVDTRYASRVILNSYQQYFGNHEMGTKVKVVRGKFTSQLRKKWKIFKDRNESHSHHAIDALIVAATANLRLWKKNKLGISDEGKVYDKETGEILPFEKLTASEYNEMMNKEPYLNFKTKLQNIETKVKYSYKVSKKVNRKISNDTIYSTRERDGIDYIVGKIKNIYDVKTYKDQFLKRYKKNKEQFLMYQHDPQTFAILESIMATYPDAENPFLAYKKEHGVIRKYAKNKAGAPVTSLKFIDGALGQKIDVTYKNKAALPKNKKVVLQSIKPYRADVYYDEGNKRYHLIGVKYSLFSFSKQGYVINPIAYQKLLEKEQIHSEMKFCFSLYREDIIESGEDPDSLTRYRFWSKNESGKNKIEVKPIEKPNFEDRKVITITKKIKILNKYQTDVLGNSFKAQEEKDPRSIE

SEQ ID NO: 1077 - protein, 1392 aa, Lactobacillus kunkeei
MKNYHIGLDIGTSSVGFAARDDENNLIRVKGKNVIGARLFAEGKTAQERRMARTSRRRYNRRKWRLRLLNDIFHDEIVHKDKDFFNRLKQSSISPKDDRKKYFGSLLFPELSDSEFYHNGNQTIYHLRHRLMTSNEKADIREIYLALRHIVKYRGNFLDDTPVSSFEASDLKLGSFIPTLNDLFETIDVNYVFNSENTNQIESILLNNDLRNSDKSKQLVDLLYRNVSDVDDKSLEKQFNKFRKDISKEIAKSFVGSKFNVNKLLAYETDDGSKISLSFSDASSDDKMLELADNLDDERINILNALKVIYSRVRLNQIIPNGMGLSESMIASYELHKKQLNDLKKLLNVLPFHEKYAVKVAYAAYIGNMDAQKFTQAELSTIESLKEKDSIKKVIDCKTGHITNESLISVINQIVVNPYLENSDFELIDIVKKIDQDIKNGEYLLKQRNNQNGNIPHQLHQMEMDQIIEKQSKYYPFLGELNPNENRRHIAKYKISELVAFRVPYYVGPLITPEEQAKTSGASFAWMKRKEDGEITPWNFDQKVDREATASRFIKRLTVKDTYLFNEDVLPDNSLLYQQFKVLNELNVVKVNNKRLSQAEKQGAFNDLFKVTKTVTAKRLKNYLVSNFNHLDTIEITGLSDGEKFNNGLTSYVDFQKIFGDKINNLELMDDFESLIEWSTVFEDRHIFEEKVRNEINWISESELKQLVAKRYSGWGRLSSKLLVGINNDEGRNIIEQLFETSETFMEAISRPEVKKQIDEINSDFIKNTDIESVLADAYTSPQNKKAIRETYKIVKDIQKAMGGKAPESISIEFTRNPEDKGELTRSRHSEISRKYKELSKEISKELNDELKSKKNSMDIDKYYLYFMQMGKDLYDGKSIDIDDLNNYQIDHIVPQSFYKDDSFDNRVLTYYTNNQKKGNNTPLNGLNISNETRKLWSHLHDLGLISKRKYLNLTMQGLDSLSKYTKHGFIRRQLVETSQVIKLVANILSDEFSADNTKIIEVKAKMNSQMRHSFNLYKIRELNDYHHALDAYLTTFIGGYLYNRYPKLRGMFVYGDFKKFDVNDANNVKTLNFLHDITNPSDKFVNQIYDEQSGELILDRKHAIETIKKIYQYKFMLITREVSTKDDKLSDQTVYSAKRINNVASPIPVKKDSNPELYGFRTGNVDHHMVIVKYPKKDSFVYKVVGIPIRFMQELRSSKNQSEYENTLNQIVQAKLNRKKFDFRVVVDNVMYGQLIQDGGQKFTLGSSTYRYNAKQLVLDMDSLRILSDEKYRNSLTDDEKNSEFINIYQQVLNVVNEKFDVFDVRGTRDKLTKGLDKFLNITSNDKEIVLLKILSGLHCNAARVKINEIGINTSFGELQTTHGIVLSENSYIIYQSPSGLFERKVRLKDL

SEQ ID NO: 1078 - protein, 1397 aa, Caviibacter abscessus
MKDYNIGLDIGTSSIGFAAIDDDNNLIRVKGKNVIGSRLFAEGKTAAERRGFRTARRRYNRRKWRLKLLDEIFYEEIIHIDPEFFNRLKQSSISPKDESKKYFGSLLFPDKTDSAYYHDGNQTIYHLRNRLVHQKEKADIREIYLALRHIVKYRGNFLDSTPVSSFEADNLKLDELVPVINDMYENIDIDFSINVDNISEIEKVLLDNHLKSADKQDRLKELLYDNPEYPDDKVKQKEISKFRKDLDKEIIKVIVGYKFNAYKIVNYIPDDGSKFSFSFSDESSDDKLDDLSEVLDDSQMEILNTLKVIYSRVRLNQIIPNGMGLSESMVAKYNRHHEQLEDLKELLDVLPNDEKRSIEYAYTAYIGNVDKQKYNNNLVASLKDLPIKGDINKKIQAVFEYAKGHISSQDLYDVIKTIIIDKYLEDESFEYHDLVERISNDIDNKDYLLKQRSSQNGNIPHQVHQMEMDKIIANQSQYYPFLGVLNPNESRRHIAKYKISELVSFRVPYYVGPLITPEEQEKTSGKHFAWMKRKEAGKITPWNFEEKVDKEATAAKFIKRLTVKDTYLLNEDVLPDNSLLYQQFKVLNELNIVKVNNKRLTLSEKQGVYNDLFKNTKSITVKRLKNYLISNYKHLENIEITGLSDGDKFNNSLGTYNDFKKIFGARIDDVNYSADFENIIEWSTVFEDRSILKEKLEKDIDWITPEEIKAVVAKRYSGWGRLSAKLLTELLDDDGQRIIDILWNDSITFMEAVSKPEIKAQIQNINRDFIKATDIETVLDEAYTSPQNKKAIREVYKLVKDIQKAMGGKAPSSISIEFTRSPEDNGSVTKTRYNNMQNKYKELGKELSDDLSAQLKEYKGRMDQDKFYLYFMQMGKDLYDGSTINLDDLNSYQIDHIVPQSFYKDDSIDNRVLTHYTNNQKKGNHTPLNGLNIDAQTQNLWKHLNKLGLISKKKLQNLCFKDINQLSKYTKHGFVRRQLVETSQVIKLVANILSDEFANDGTKIIEVKAKMNSLMRDTFNLYKVRQLNDYHHAVDAYLTTFVGKYLYKRYPKLRSMFVYGDFKKFSAEDDLKDIKTFNFLHDITNPKESNKEKIYDEKSGELILDRKHAIETIKKIYQYKFMLIVREVSTKSGQLFKQTIYSAKKTNGLKSAIPVKSNLEPSIYGYRSGNVDHHMVIVKIKKGTKYSFKVIGISARAIQELEIAKKIGNYRDKLYEVVSDRLSQSMKSVESFRIILDNIMYGQLIVDGNDKFTLGSADYRKNSRQLVLCTNSLKILKDEDYMNRLSDIQRSKLMVQVYDEIIKIMKNKYSLFISNTEKLLEKRDIFCGLSFDEQKIVIWKIIIDLHNGPFTKIQELGINNKMGTFQTKHGIILTENAIVIYQSPSGLFERKVRLKDL

SEQ ID NO: 1079 - protein, 1483 aa, Prevotella corporis
MKTILGLDLGTNSIGWAKVSLDDNGNYLHDIKLGCRIIPMSQDVLDNFGKGVTVSQTSVRTGFRGVRRIRERSLQRRERLHRVLHRLGFLPQHYDAAIGWDSDCAKTYGKFLDNGEPKLAWERQEDGSMRFLFMNSFYEMIADFTSHQPALVADGKKIPLDWTLYYLRKKALTQAIRKEELAWILLSFNQKRGYYQLRGEEEDENPTKREEFCELKVVAVEAAEKGKGDDIWYNVHLENGCIYRRSSKISLDDWVGKTKQFIITTEYEKDGVTPKKDKDGKEKRSYRAPKEDDWGLRKKRTETDLEASGKTVGAFIYEHLLAEPFDKIRGNFIHTIERKYYRAELEAILTEQRKYHEELRSEQMLAVCAEELYRSNLPHQQSLLKKDMVYLLLSDLIFYQRPLKSKKSLIADCPYEYYRYVDKETGEIKKQGIKCIAKSNPYYQEFRLWQFVLNLRLFDRMTDKEVTADYLPTKEDYVRLFDYLNNRKEINQETLLKDFFRLKKVKLGREKEFEIRWNYIEDKEKKYPCNETRYELLVALDRAGIDRSWIDEDGRQYRLWHLLYSIEVKAEAESALRKLNSDDAFVSSFLKVKPFKKDYGAYSEKAVKKLLAVMRMGSMWSEANICEETQNRIRSIIRGDIEEKIKERMGHTARSFNQIDDFQALPEWLACYVVYGRHSEVTDIQHWETPEQLQSYINGFKQHSLRNPIVEQCILETLRTVHDIWKEAGHIDEIHVELGRDMKRTADQRARMTKNILKNENTNLRIKSLLMELKKDTDIKEVRPYSPMQQEILRIYEEGALLQLKRDDEAFADISKISQMAQPTATELRRYKLWLDQKYRSPYTGKFISLSKLFTSAYQIEHVIPQSRYFDDSFSNKVICEAEVNRLKSNMLGYEFIKAHGGEIVHCTMLGDVKILSESEYKAFVNEHYVNHRAKKEKLLMEDIPQEFLNRQMNDSRYISKVVKALLSNIVRTEDEMDVTSKFVVPCSGGITDRLKKDWGLNDVWNSIVYPRFERLNRMTGTEAFGHWENKEGKRVFQTSVPIELQLGFSKKRIDHRHHAMDALVIACASRNIINYLNNESANSQKKREDLRRLLCDKNRIIRKPWESFTQDARVALQDIVVSFKNYVRIINKATNYYERYDEQGKKTTAEQKSSEMWAIRKPMHKETVFGHVNLKRKTTVKLKNAIENIPNICNKELKAYINELVEKHFNTKQMLAHFKSINYRWNRQNVEKVEVWQYSDEKERMAATRKPLDTSFDKKRIETITDTGIQKILLNYLEEKGGDPNIAFTPEGIAEMNKNISLFNDGKLHQPILKVRVAKTMGAKYQVGQTGNKAAKYVGAQEGTNLYFAIYENEEGERSYNAVPLNEVAERLKQGMSPVPEKNEKDVPLKFYLSPNDLVYVPTEEDKLSNECKLDNERIYKMVSATGKKCHFLPYSVANIIYNKVEFESMNKMGKALSGEMIKAVCWKLEVDRLGTILRVIK

SEQ ID NO: 1080 - protein, 1402 aa, Coriobacteriales bacterium
MKLRNAKDYSIGLDVGTGSTGWAVTTLDGDLFTFNHRPTLGSRLFESASTAQETREARGARRRLKRRRWRISLLQEQFAAEMESCDSNFFIRLNQSRLWQEDRTEQGKGYLFGGKPILCGAQIFANEQEYYQQFPTIFHLRKFLVECSEQVDLRLIYLALHNIVKYRGNFLYQDNKTLNVRNFNLDSQIADFLDQLQLWCENNDLCFHEIDGTTTLASQLNTCFHQQSNQQKKDTLKTFFATCIENDKIAGELTKALLGYKTDFKIIFNIEGEKDEYKAKCNEEEKILKLQETIDDANQVLLQSILNLYSGIIVEKILNNTAVKNESAQCTLSAYHCYSYALYSKQLRTLKKLVRKYNPQRYNECFNLSAEDPKAKKQLCTYARYNAQHSTDYDEFKKYIKDLFENTDAVNDAAYQQMKQDFDEEKFLRRQKTSDNGVYPYQFHLEEMQLIIENQAQHYPFLTKIKPKLESLVTFRIPYYVGPLTQKGIQRNGRKFAWSKRNKDAENQRIYPWNWDSIIDKSASAEAFILRMTGKCTYLYGEDVLPKESLLYQEFCVLNELNGARWNCDGERRMPLSNKDCKAIYRQLFLKKQKVSYADVSNYLKAQGHINNSVAGGQGEHGFESTLSSHHFFRKLFNVDAANDLTAQQIETAEQLILWGTIFEDKEIFEQKIKERFGDMFSKDEIKTIARRKFSGWGKCSKQLLSGLTVETPRGRESIIDVLRNGHPENGRTLVFMQVITDKKLEFDKKIEEYNNEHLAKTNESVLDTAIMSPAIKRGVNQALHIVGEIRRITKHDPTCIYIETTRDEKDGKHNTRTSSRYSSLKKNLETLKSIDKANAPAIKHSLELLETYKKQNIDDKLFLYFTQNGKCMYSGKSLDINNLSSYQIDHVIPQSYITDNSFDNRVLVYASENQRKSDSLLLSSVIQAKQEPFWTSLEKAGLISEKKHNNLKRKSLSDAQIKGFINRQLVETSQIVKVLRDELSRILPDTKIIPVKASLSHDVRIACNLYKSRTANSFHHAHDALLASTMGRFVQTRFPDMYENPVRYVKILRAYIAQSKLQHSAQTRNFDSRSFMAHSFFCDYSNENGDTIWNSASEIERLRRALSYKNLYLTRRPFIDAGQFWDQTIYSPHDKKKTPDSLIPLKKNLDTQKYGGYSGKDYAHFFIYSVLNKQGDVEYRFDGVPLYIAANINRDDRGALAQYAKQLVEHENVPNAKRKTKDLVFQRIERACVPKYQLICISQCSGDSDRSVSDYYYITGKKEVRNALQLAFPMHLYGAINAIEDKKELDDSALEELVVYILRNAPRIAPDVFRRLNLTEKLADCLDIPDRIELQNSIYGLFNLINAESNVVNLQIFGGAKTAGVKLINLNSLLNDPATTVTFIDQSVTGMFERKETIGIS

SEQ ID NO: 1081 - protein, 1400 aa, Olsenella sp.
MNLRNATGDYSIGLDLGTNSVGWAVTDSNGSMAHFKGKPTLGSRLFDAAETAAGARQHRGQRRRYVRRRWRLDLLQGLFQDEVNKVDSEFFIRLRQSRLHVEDRAEGHAGYRWPLFNDTDFTEKDYYKRFPTIYHLRKWLMETDEKADIRLIYLAAHNIVKHRGNFLREDNKNLSSHNANPAEAVRSLRQALDDWCAERGYVCAWTSVDDLAEADSHILDILTNSKERRADQAKELAKLFGVDCGDTKQSKSCNSALAKAVVGLKTELKDVFGEFCAEKTAIHLSSDDDVEAIRDAIPDDSGELFQVLCAVYSAYVLQELLSYAPGQTISANMVAKYDQYGKDLKLLKNLARTYVSRENYDAFFRGQTYEDSNDYNVDKAQGYTRYNLGTTKASYDDFKKSVEKLFKGTQAEQDKRYQGMMKRFAEEKFLRRLKTSDNGSIYYQLHLEELRAILKNQGKHHPFLLEEEKKIESLVSFRIPYYVGPLSSKNASLDHKGKQRFAWSERRPGMKDTVITPWNWDQIIDCDQSAEKFILRMTGDCTYLQGEPVLPKCSLLYEEYCVLNELNGARWTIDGDDWRRFDVAQREGILHDLFRKTRSVAYNKVADWLEREENWANAHVRGGQGENSFESKLGSYIFFCKDVFKTAALDEADYPMIEQIILWNTLFEDRAILKRKIEQAYGEHHGGKLTDEQIKVICKKRFTGWGRLSRKLLTGIKVDADTGRVSIMDVLREGNPNEGQRSRTMVLMEVLRDEDLGFQKKIDDFNKAYFAGQGEGLMSVNDLPGSPAIRRSINQAIRIVDEIASIAGKAPSNVFIEVTREEDDPRKKGRRTNRRYEDIKNALENFKTEDQELWSELLGKAPNDLDERLSLYFMQRGKCMYSGRPIKLEELHTGKYEVDHIIPRSYIKDDSFENKVLVCREENQRKTNEMLIDPAIRRRMGDYWRMLHKAKLIGDKKFNNLFMRDRIDDKTLKGFVARQLVETSQSVKLVQTLLEVRYPNTKIVPVKANISHDLREAADLVKCREANDFHHAHDAYLACRVGLFIQKRHPSVYANPIGLSRVMRDYARKQAGEFNKTHSMAHTKGFIVNSFMTSEFDKETGEIFWDAEAAVEDIRRVLNYRQCFISRMPVEDTGAFWDQTIYSPRSNKRLELPLKDDLDPNKYGSYSREQFAYFFIYEARDAKKSKTVLRFAQVPVRVTSAIARDSSKLDEYASGLAVQEGLEFTKIIRRRILKKQLLELNGDRLVITGAKEVRNATEFAFTLEETALVAMCSEIAREGVPSEIASDVQSISSQLSDLFLALIERGLTIGVRLHGQLKLGQYLRQFEDAALRDKAKVIIGIISITNGATNTLDLSSLNGSKNVGQVRITHNKLLNDKSTSYVLIDQSVTGMFERRTRIGL

SEQ ID NO: 1082 - protein, 1404 aa, Parvimonas sp.
MKGNIEKKKQEFNDYYLGFDIGTNSVGWAVSDLSYNLLRFNKKDMWGARLFDEAKTAKDRRVKRNSRRRLERRSKRLKYLEEIFETEICKIDKNFFRRLEESTLHNEDKTFDFRFPIFNDENYTDKEYYKDFPTVYHLRNELIKNENKKFDIRLIYLAIHNILKYRGHFIFEGQDFDSVTDFKEVFSELSAYLSENLEENLDINLCDNIKDIICSKENKTSKGKSFVSLIDSKVIQSVLRCCIGYRVKFKDIFINYEEKEKNEGINLSEIEYDEKRDEIALSLGENILLIDICKKVYDFMILNNILKGNKYISESKVNLYDEHKCDLCNLKYIFKKYLPKKDYFEFFRNENKEKNYVSYISSSLNNGKKKNTCTQEDLNKEIKEYIAKIKEYEENDAVLEKINLKLNENKLLPKLKTNDNGVIPYQIHKIELEKILQNQSKYYDFLLEKIDGITNIERIEKLFTFRIPYYIGTLKGKFSWAKLKENKKITPWNFEKIVDMEESAKAFIERMSNRCSYLKTENVLPKNSLLYSEYELLNELNKVKIKNEFINVVLKNEIIDELFKTTSKVTKKKFVDYLKTKQIFVEKEDISGLDNEFKSKLDSYIKFKKVIGDKIDTLRGYNFVEKCIEFKCFYGDDKKLFKNAINNTEFKDYVSDDELKKINKMKFNKWGRLSKRLLTEICFENVIESESFENIIVALRSTNYNFMEFTSKKFNLSEKVAEENQENTLEKFNINEYVDELYVSPSVKRSIIQTYKIAMEIKKITGKNPKKIFIEMARGGGEKGKKTEKRKERIKTLYANMKDSNEEFLNNLDNLKLSVDNYDDNRLREKKLFLYFMQLGKSMYTGKNIDLNELLFANTYDIDHIIPQSKLKDDSFDNIVLVEKTINKDKDNRDYLDESIRLRMNKFWNFLREKGFITIEKYNRLRRNTYFSDDELSGFISRQLVTTRQSTLEVKKLFEFIFQNTDVVCSKANLVSDFREKYGIIKVRDLNDAHHAQDAYLNIVVGNVFDTKFTKNYWKFIEDRRKVDNIRETYNFKKIFDYDVSRGENVAWLKDYSINTISEMINKKTANITQMITEGKGQLFDLTILKKSKIDKKLTVIPNTPKILKSSLKDSCKIAEKYGYFSTLMPAYFVVFKYIDKNKEVFGFDRIFIFDREKINSNEDIEKYLEDKGYNSPKFIRKVNLKQKILLNGYPYRIVGFTDNKLEIKNSKQFYSDGEHLKYIKHLSAFYNNNNNVKNGEYRINFLKKTSENDRNETTDEAKERLNIEFIKLYEYFCERLNSKIYANYYNSKKYDELIEVFDCFKNLNLLDKAKLLLEFLKIFKKDTYGNFKLLEKPELDKNGKQKLDKNGNLSFEGLSMAFGKLNGKKFKQLVEKDIQFVDESVTGLFEKKEGLEKWQDGEQ

SEQ ID NO: 1083 - protein, 1191 aa, Porphyromonas somerae
MSKHVLGLDLGVGSIGWCLIALDAQGDPAEILGMGSRVVPLNNATDAADFSIGKAFTASQERTARRTMRRGFARYQLRRYRLRRELEKVGMLPDAALIQLPLLELWELRERAATAGECLTLPELGRVLCHINQKRGYRHVKSDAAAIVGDEGEKKKDSNSAYLAGIRANDEKLQDEHKTVGQYFAEQLRQNQSESPTGGISYRIKDQIFSRQRYIDEYDQIMAAQRVYYPDILTDEFIQMLRDEVIFMQRPLKSCKHLVSLCEFEKQEKVMRVQQDDGKGGRQLVERKVKFGPKVAPKSSPLFQLCRIYEAVNNIRLTRPDGSPRDITPEERAKIVAHLQSSASLSFAALKKLLKEKVLIADQLTSKSGLKGNSTRVALAAALQPYPQYLHLLDMELETRMMTVQLTDEETGEVTEREVAVVTDSYARQPLYRLWHILYSIEERDAMRRALITQLGMKAEDLDGGLLDQLYRLDFVKPGYGNKSAKFICKLLPQLQQGLGYSEACAAVGYRHSNSPTSEEITERTLLEKIPLLQRNELRQPLVEKILNQMINLVNALKAEYGVDEVRVELARELKMSREERERMTRQNGERKKANDKVAEKIQKCGLFPTKSRIRKYRLWEEAGRQCLYCGRSIGEKQCLNGDDMEVEHIIPKSVLYDDSYGNKTCACRRCNKEKGNRTALEYIRAKGWEAEYMERINGLLDKKTISYSKHQRLRWLKEDIPSDFLERQLRLTQYISRQAMAILQQGIRRVSASEGGVTARLRSLWGYDDILHTLNLDRYDSMGETERVSREGETTEKLRIKDWSKRKDHRHHAIDALVVASTRQGYIQRLNRVSSESEREAMSGEIEVQKATKTDKLSLLERWLTQRPHLSVRAVSDKVAEILISYRPGKRVVTRGRNIYRKKTADGREVTCVQRGVLVPRGELMEASLYGKILSQGRERIVKRYSLHALKGEVVDPRLRELITTYNQELKSREKGAPIPPLCLDKDKRQEVRSVRCYVDKPSVSSAIPIRFDERGTAITFVQSGNNHHLAVYRTPQGVLEESIVSFWDAVDRARYGIPLVITHPREVMEQVLQRGDIPESVLKSLPPSDWMFVESLQQDEMVAIGLSDEELQSAIEAQDYRKLSEHLYRVQSLSSKYYVFRYHLETSVKDRKNTSGRIPKFHRVRNLPDYEKRNVRKVRVDLLGRISLL

SEQ ID NO: 1084 - protein, 1487 aa, Prevotella amnii
MKNVLGLDLGSNSVGWALVKTEDNGNPIGSIKMGSRIIPMSQDILGSFEKGDTVSQTAQRTLYRGKRRLTERHVLRRERLCRVLHIMNFLPDHFDKLLGWDKTDNKTYGKFIDDSEPKLAWRQNKNEKEKMEFVFMDSFHEMLSDFAKHQPQLIANGKKVPLDWTIYYLRKKALTQLISKEELAWILLNFNKKRGYYQLRGEEEEEQPTKKEEYKVLKVISVDADEGQKGNGIWYNIHLEDGGIYKRKSDIPLYDWVGKTLQLIVVTIYEKDGKTPKIFDSGKQNPSYRLPKEDDWGLIKKRTESQIQSSGKTVGAFIYDNILSKPADKIRGNLVRTIERKYYKKELIEILQQQAKYHDELHNQHLLESCAKELYAHNDVRYNEVVKSNMIHLLVDDIIFYQRPLKSKKSLIDNCKYESYEYVDKETGEVKEMPIKCIAKSNPYYQEFRLWQFIHNLRLSDVVTREDVTAQYLSTPQDYCNLFTYLNDRKEIKQDILLKDFFQIKKVQIDKEKVFPIEWNYIKDATKTYPCNETKYELLSALKRAGMDKQWLDDTPNMQYRLWHLLYSVEEKEESAKALRKLYDDDNFVSSFLKIKPFEKCYGAYSEKAIKRLLTLMRMGKAWDEQAIDAKTLKCIQQIITGNIDSKLKEKIDDSRYVLHHVSDFQGLPTYLASYVIYGRHSEVTDIRCWDTPKDLLKFICGFPQHSLRNPIVEQVILETLRVVYDIWKAEKHIDEIHVEVAREMKLTAQQRNEANLRNLNNEATNLRIKYLLEELKNDTFIKDVRPLSPMHQEKMRIYEQAVLGNLNKQDKDYDDIIKISKKERPTSAELIRYKLWLEQKYCSPYTGKAISLSKLFTTAYQIEHVIPQSRYFDNSFNNKVICESEVNKEKDKMLGYEFIKGRGGDRIYCTAHGKEVTILKEEEYKQFVNEHYAHNKRKRDNLLAENIPESFSSRQLNDTRYITKTIMSLLSNVVRQQGEEEATAKNLLPSSGAVTDKLKNDWGLKDVWNTIVTPRFERLNKLSGTNDFGEMKEENGNRYFQTNVPSEYEKGFKKKRIDHRHHAMDALVIACTTRNMVNYISNVNANSPKQREDLRQLLCDKNRIINKPWNTFTQDALKALNDIVVSFKNNVRIINRATNRYQRYDKNGKKMICSQKGNDMWAIRKSMHKETVFGRVNLIRKEALPIAKALDNISAICNAQLRAYVNDLVDKHFNKKQLVAHFKSLDYKWNRQDVSKVEVWISSDDKTPMVAVRKPLDTSFDKKKIASITDTGIQAILLNYLESKGGDALVAFAPEGIQEMNSNIELYNNGKAHKPIKNVRLSETLGAKYQVGERGAKTKKYVVADKGTNLFFAIYEDEEGKRYYYSVPLREAIERQKQKLSPVPEYNEKGVALKFYLSPNDLVYVPTEEERTMGTCHIDKTRIYKMVSSSENRCCFVPSTIAKVIADKVELLSHNKIEKAITGESIKEVCWKLKVDRLGNILNVIK

SEQ ID NO: 1085 - protein, 1222 aa, Prevotella sp.
MKKRILGLDSGTNSLGWAVVDRDENNQYSLIKYGDLIFEEGVKIEKGVESSKAAERTSHRALRKLYFRRRLRKIEVLKVLVKYNLCPQVSEEELHLWHTRKLYPQNKDLLQWQRTDEKAGKNPYIYRYRCLHEELDMSVSANRMTVGRAMYHLAQRRGFLSNRLDNEEDENQIGAVKCGISNLTEEIQSSGCKYLGEYFYKLYNEHGNTVRLRTRYTSREFHYKKEFYAICEKQKLDKKLIEELASALYFQRPLKSQRHTVGRCTFEPNKPRCADSHPAYEEFRMLSFINTIKVQGPYDTELRVLNTEERDSITKLFCRKSKPNFDFEDIAKELAGRNNYCYIGDVVDKAYKFNYRMSQGVSGCPTTTYLINVFGQDWQTGIAESYQAIDTKLGQKSVDAMIDDVWNVLYSFSSKDKLRDFGRKKLQLGDKEADTFANIKLTHKFASLSLKAIRKINIFLRMGLVYSHAVTLANIPTIVGTDIWQRKRNFILAELLPLIENFNPKETKLQETLDFCVKDFLQNNFELKNGAVDKLYHPSMIEAYPDAGLNSNGILQLGSPRTNAIRNPMAMRSLHEIRKVINQLLKDKIINQDTEIHVEYARELNDANKRKAISIWQKSQEKLHKKYVEEITNLYKEETGKAIVPTDTDILKFKLWEEQNHICLYTGQQIGIAEFLGATPKYDIEHTIPQSVGGDSTDMNLTLCDSRFNREIKKAQLPTQLGNHADILVRIAGWKNSYEKLSKDIDRIRTHSGMAKDIKDRLIQKRHLLKLERDYWRGKYERFTMNEIPEGFSRRQGVGIGLISKYAGLYLKSLFHDKNERNKGHVFVVKGTTTAEFRKMWGLQNEYEKKSRNNHVHHCIDAITIACIGKHEYAQMAQYYHDEAEYLYHHGIKPIFPKPWKTFTEDLLDLEHSLFVVHHSPNNMAKQARKRIITSTGQHWAQGDSAHGSLHNDTYYGAIERDGEIKYVVRRAVSSFEQMSDVDSIVDDVVKETVRKALEGKNFKEAVNAPIYMNKEKGVLIKKVRCYAKSIKKPIDIRTHRDSSSKEYKRKFHVSNDINYLIAIYEGTVKGKVKRDFEVVKNIEAANFFKRSQDRRDYPTIVPEKSIKHGFPLKTTLTNGTMVILYEENKEEIDFTKKEDICRRLYKLVGMSSMIVSGCEYGVLSLRHHQEARPSKDIKSKNGAFKNGEALRPAITMLHTQFNALVENIDFNIDVTGNIELI

SEQ ID NO: 1086 - protein, 1376 aa, Veillonella sp.
MSNFDNHKDSICKHKGLKKGNYYIGLDIGTNSVGWAATNEQYELLKFKSHKMWGSRLFAEAQTAVDTRMKRSARRRLQRRKFRLILLESLFSKEINAVDETFFMRLHESNYHVEDKTNLVKYTLFIDKNYTDVDYYKEFPTIYHLRHHLMTEGTKDIRLLFLAIHHILKYRGNFLYGKKEFSVDGEMYSVLRSTLEELGFGSYVEDENVLQSIANLVLDRGIARSEKVKQIEPLIAQGKKLSSVEKNRLKAWAYLIMGLKANLVNLFTDEDVEVVLPEEKEFKSINLHEGIYEDVRDAYEDAWGDRFAIVDQCKVLHDIIVISSIIKPGQSLSEAKIESYNQHKEDLVLLKSVLKEDKKLYDDMFVVDIDKGTNYVKYIKQGVNGNTSTTQEAFYKYVRKVVSVLPETENTRCIVQKLEEGTFLPLQRISKNGVVPYQLHKEELVRILEKAKLNFPFLNEVEDGLTVADKIISILEFKIPYYVGPLNPTHSIENGGFAWVVRKEAGQVLPWNFEQKVDVQASAVKFIENLTNKCTYLIDQDVLPKYSLLYAEFSLLNELNNIRVNDKPLPADVKQAFIRDHFISLQDSKTATKKVVAKYLVDNNYVSQPPIITGMDQQIATKLTSHRDMTRILGEHFDYAMAEDIIRYITIFGESKDMLRQVLKNYYGDRLTTEQIKKLGKLTYTGWGRLSKKFLSDIWGMKKNDDDAEAGTIIEHMREGQENLMQLLSSSYSFIDVVQEYVTNVLGAKEKTAFEMLEDLSLSPMVKRSVWQTLRILDEIVSIRKELPKKIFVEVARTNKADKKRTQSRKALLEELYEQIKDEDVHVLQQELESKEDSALNSKKLYLYFTQMGRCMYSGRRIDIHELFTDTYDIDHIYPRSLTKDDSWHNIVLVEKQLNAEKTDRFPILSAIQSKQKGFWKLLWDRGFISEKKYDRLVRTTDLTDEELNQFINRQIVSTNQSVKAVTTLLHQLYPETEVVFSKAENISDFRRDYGFVKVRSINHHHHAKDAYLNIVVGNVYHEKFTKNFLSFAKQKGTHRTYNLTKMFEYEIKLTEESKKVIWDPNIHMDIVKKMMKSNDVRVTQRAVPQKGGLSDETIYKKGIAKRGVYLPLKSSDERVRDVEKYGGRTSITISEYIILNIRDTSDQDRIEIFSLPLYIAGKKDIHKAIEEAYLSTCKKPASVVDIQILYRGLYIGSKVNINGFTYYMGGKTGSNVSVDSAVDVVMDITSSVYIKLLEKVAIKKIENSKTFRIENIKTSYNHKEVTVSKEQNIALYQELLKKLDTPLFSKMKGNKLEEFRTVGFDTFIALSLEDQASVLLEVLNVLTNFKTKRDITKIGMTSSRSTLGINISNTEQFSVITTSITGLYEQEIKIK

SEQ ID NO: 1087 - protein, 1333 aa, Eubacterium sp.
MGKEYYLGLDIGTDSVGWAVCDTNYKIPKFKGNAMWGIRLFEKSNSAEERRGFRSSRRRTQRKRERLKLLEMLFDEEISKIDPAFFIKLRESNLYLEDKSTKIPYCVFSDENYTDKDFHRDYPTIYHLRNELIKSNKPHDVRLVYLALHHIIKNRGHFLFDYSYKNDKSGDFMPIYNDLKNYFYDNYEIELDCSDVDEFANTLKDKSKGKTKKNAEIAELFGVSKKYDKVLYSALSLLSGSSVKLFDIFDDEALKDVEKKSVSFSSGFDDNANDFQSYLGERFELLEKLKAVYDWAVLADILDGKEYISEAKVAIYEKHKRDLKTLKKYIKIYMPEKKAEIFNISSKDNNYVAYSKHIKTSNGTGVLISTCTQEEFCAYLKKTLGICKDASYEEMFKEIENSTFMPKQVTKDNGVVPMQVNEKELVAILDNAKEYLPFLLNKDNDGKTVYDKIKALFEYRIPYYIGPLNTHSTKSWLVRSNEKIYPWNIEDVVDFDKSAEKFIENLTSKCTYLPQYDVIPKHSLLYNKFCVLNELNNLKIDGEKISVQLKQDIYNDLFKKYYKVTNKKLCDYLKSRNIAFDEISGIDNDFKSSLKSYKDLVAYNLTDEQKEEIVKAITIFGDDKKLLKKRLKNEFGGCLSDDEIKKICKLKYTGWSKLSREFLTDVTAVYKETGELINIICALWETNYNLTSLLYSDEFCCDDKENKTFNDKINELNSFGNDKTLNQIVEELYVSPLVKRPIYQSLLITKELEKIMKCPPKKIFVEVARGAEEKKRTVSRRNKLLDLYKSCKNDYPLLFDELQNNTTDDELKSDKLYLYFTQFGKCMYTGENIELGDLFNKNLYDIDHIYPQSKIKDDSLDNRVLVKKTTNAKKDNEYPLSSQIREKMTPHWKALLDKGLINKKKYERLVRNYPLSDEELSQFISRQLVETRQSTKAVANILEQLYPRPDTEIVYVKAALASEFRHQYDMLKCREVNDLHHAKDAYLNIVVGNAYNGKFTHNKANFIKGLQNNDKAYTVKLDSMLKHNIDGAWIADNNESLNIVKSTMNKNNIRYTRYAFEKKGGLFKVTILKKGNGQASIKKNDKRNSIEKYGGYNQVSSTYFSCVEHGKDNNRMISMFSVNLYDKNKYEENPIAYLIENYGLINPIIKVKKVKIQSCISFDNMLCHLGGKDSGGSQISYRPGVQLVLGYDNERYIRNVIRCAGGDLHLQTSKNEKDIVTAEKNIELFNLLIEKMKNNIYGVLYSNLGDKLYCSKEKFEKLDIVEQCNVIKNVLTILKNNASKGDLKSIGIKANGAIRLNNNISEIKKVKSIKLINQSVTGLFEQEIELLNL

SEQ ID NO: 1088 - protein, 1445 aa, Chryseobacterium indologenes
MMIKNILGLDLGTNSIGWALIKQDFENKYGEILGMGSRIIPMGAELSKFEQGQAQTKNANRRVARGTRKLNKRYKQRRNKLIYILQELGMLPDQIKLVNQFSDPNKLDKISILPISKNRQQLTAFDLLELRVKALTEKIELEELGKIIYKYNQLRGYSGGNSEPEKDENNEDESEEKEKTNDSFVVFSKVLSLGLPEEITFKGKKLNKRKISIETEDGIIEAETFLDNIKENDSLELQVNIRRAKSGDTITIKLPSKTSWRKKMENIEKQLADKSKELDREYFISELLFDILKENKWAKIRNNVILRSRYESEFDAVWSQQSKYYPFLNHLETDRLQKILEFIFPGQKESQEKLRQTGLKEGLKYVIKNQVVFYQRELKDQSDLISNCRFEPIEKVVAKSHPVFQEYKIWEQINKLVINTKIENGVNRKGEIRYKYIDKPIPVALKEWLYEELESKKEVSFNPILTKLKKEFNLRENVDFLNGMNAKDKLKGNETKVILQKALGELWNIFSLDDSERQVELWEILYNGKGNEYDLTSERTSNVLAFIEKYSPDLENKNDVAIKISKIKFSRNYSNLSLKAIENILPLARAGKFFDQNFSEALSQKILKLLNENVEDPFEKSAQEFLDKNQDVLSDGGIVNAIATILVYDKHTAKEYSGDELLKEFTQISRLKQGELRNPLAEQIINEALIIVRDIWRKYGFKPDEIRVELARELKNNAVERGKMYSANLKSQKHNAEIRNKLIELKQEISIANIEKYKLWVSQENLQEVYLKNYNDPSKSEIEKLKLWESQGHVSPYTGQPIPLSELFNRERYDVDHIIPQSRYFDDSLSNKVICEKSINNEKGNRTSMEYFEVGSVNYRIFTKDQFIDHANKYFSGKKRINLLATSIPEDPIQRQIKDTQYISIRIREELNKIVGNENVKTTTGGITDYLRNHWGLTDKFKVLLKERYEAVLPKIAQLEYDNYKKETEKKFTEYKNADVEFNEPILDEEIFIEKFRSEFIRKKNNKLIIKGWSKRIDHRHHAMDALVIACTQPAHIKRLNDLNQVLKEWLDKNKEKFFPGFSGTKTELLDEVLNLEEEKRREIFNQLEKFRAIEMPWNGFPEEAEQKFKEIIVSHKPKDKLLLQYDIQGNKQIKLRGQLHEAKNYGLKNGKETKRIQLSELFDKEKSATLGNLNKITNEFLKKIILKHYEEDYKFNNKDAFSAEGILDLNKKLAERKDEQGNPKPHPPISTIKIYYKDPSKSKKKKTDDEDDISLQKLDRQKSFNDSLYVKTGDNYLFAVMEKEVFDKKLKENKMERHYDLITFFDAANLLKSEFNNSEDKKNFSKEDLFRKYFEERNNARLLFTLKQGDFVYLPDDNEEIILDESSPLFMDYWKNTSERSNSIYVVQKFSKKQIYFLKHTIADTIVKKVEFGSQDCYEKVGVKSIKDFCFKINSDRLGNISKV

SEQ ID NO: 1089 - protein, 1504 aa, Croceitalea dokdonensis
MKRILGLDLGTNSIGWALIENDFNRKEGKIEALGSRIIPMSQDILGKFDSGVTVSQTAARTNYRGIRRLYQRDNLRRERLHRVLNILGFLPKHYAESIDFEDRLGQFKPETEVKLPYRKDSDDNYHFIFQESFNEMVEEFQFKNPSLFYTKANGEQSKIPYDWTLYYLRKKALSKKISKEELAWILLNFNQKRGYYQLRGEEEADSKDKLEEYHALKVSDVQATEDTNAKGTWYNVILENGWIYRRQSKDSLFDWKGKTREFIVTTSLEKGGAVKIDKEGNEKRSFRAVDSEKDWIAIKKKTENDLANAGTTVGVYIYETLLRNPDQKIRGKLIKTIERKYYLEELKAILAKQIQEHAELQNRSLYKDCIEELYQGNEAHKNNIKENGFDYLFLEDIIFYQRPLKSKKSTISNCPYESRVFIKDGKKEIQPIKCISKSNPIYQEFRLWQFIHNLKIYEKEAIDDGKTVINKDVTTEFLNTQEAYAALFEFLNDKAEISQNALLKYFKLSTNTHRWNNVEDKKYPCNETRSEFIKRLSKMDGIDLGKTLSPAFEKSLWHIIYSVKDKKQYVRALETFAMKNGLDINQFRENFEKFKPYDSAYGAYSEKALKKVLPLIRRGTYWKKDAIPAAVQERIVNIMKRIESVDFNLEKIENFADDDIPKQLLKSFAKGKDPMQGLNTYQACYAVYNRHSEVSDIQLWKSPEDITKYLDSFKQHSLRNPIVEQVVMETLRVVRDIWQYYGNGAKDFFSEIHVELGREMKNDKKTRERISKSITENENTNERIKNILKELMGDEALQGDIRPYSKGHQDILKLYEEGVFANAPETYKNIKIDDIEKIRKNNSPSKSDIVKYKLWLEQGYISPYTGSPIPLSRLFTTDYQIEHIIPRSRYFDDSMGNKIICESAVNEEKTNKTAYEFIKENAGRIIDLGQGKQVPLFDLEAYESHCRGYFKGNTKKLKFLLSEDIPEGFINRQLNDSRYISKVVTSLLSNVVREEGEQEATSKNLVPLVGTITSKLKKDWGLEAIWDDLIAPRFERMNQLTKSTDFRKEVIDGHGNRYFINTVPDDIKKGFSKKRIDHRHHALDALVIACTTKDHVNYITSLNTQRNNRSLVSKLRKIEEKTIKDKRTGQPKTIKIAKAYHKPWPNFTKETFEKLSKTVVSFKQNQRIINKTNNKTWGWEKVDGVMKKVLKKQEKRNWAIRKPIHKETYYGKVKGFDSPKGKITTATRKSLREITNERQLNTITDSGIKKILNNHLKTFIDESGKINFEPAFNQDGIDLLNKNIQQLNEGKNHQPIYKVRMYTHNTMFSVGDEGNKSTKYVIPESGTNLFFNVYWDEENNKRNFETVPLNRVIAFQKQTSHIPRKDRTDVPIDNTLGRFLFTLSPDDLVYLPTDEESESFTTFEIDSLNSKQVANIYKFVDGSGTTGNFVPAEAARVIANIKDKKVRSNFCKRNNLSDKQLIKNEFGLGSPQLKNQNSLDGRQIKSICWKLEINRLGKIIKVIK

SEQ ID NO: 1090 - protein, 1319 aa, Fructobacillus sp.
MGYNIGLDIGTGSVGWAALTDEGKLARAKGKNLIGVRLFDSAQSAAQRRSYRTTRRRLSRRKWRLRLLENIFSDEMGMIDENFFARLKYSYVHPKDEVNNAHYYGGYLFPTQQETHDFHEKFQTIYHLRLKLMIEDCKFDLREIYLAMHHIVKYRGHFLNSQSKMTIGDSYNPRDFQQAIQNYAEAKGLIWSLNDAQEMTDVLVGQAGFGLSKKAKAERLLSAFSFDTKEDKKAIQAILAGIVGNTTDFTKIFNRERSGDELKKWKLKLDSEAFDEQSQAIVDELDDDEMELFNAIRQAFDGFTLMDLLGDQTSISAAMVKRYQQHHDDLKMVKEIAKKQGLSHQDFSKIYTAFLKDDTDKGMKALLDKADLADDVLVEIQQRIESHDFLPKQRTKANSVIPYQLHLAELEKIIENQGKYYPFLLDTFTNKAGETINKLVELVKFRVPYYVGPMVTAADVEKAGGDATNHWVKRNEGYEKSPVTPWNFDQVFNRDQAAQDFIDRLTGTDTYLIGEPTLLKNSLKYQLFTVLNELNNVKINGHKIDEKTKHVLIQDLFKSKKTVSEKAIKDYYLSQGMGEIQIVGLADKTKFNSNLSSYIDLSKTFDAEFMENPANQELLENIIQIQTVFEDVKIAERELQKLALPDEQVQQLAKTHYTGWGNLSDKLLSTPIIQEGSQKVSILNKLQTTSKNFMSIITDNKFGVQQWIQEQNTAETADSIQDRIDELTTAPANKRGIKQAFNVLFDIQKAMGEEPNRVYLEFAKETQNSVRTNSRYNRLKDLYKSKTLSDDVKALKEELESQKSSLQSERIGDRLYLYFLQQGKDMYTGQPINIDKLSTDYDIDHIIPQAYTKDDSIDNRVLVSRPENARKSDSATYTTEVQQSAGGLWKSLKNAGFISQKKYDRLTKGGDYSKGQKTGFIARQLVETRQIIKNVASLIESEFSQTKAVAIRSEITADMRRLVAIKKHREINSFHHAFDALLITAAGQYMQARYPDRDGANVYNEFDYYTNTYLKELRQSSSSSQVRRLKPFGFVVGTMAKGNENWSEDDTQYLRHVMNFKNILTTRRNDKDNGALNKETIYAVDPKAKLIGTNKKRQDVSLYGGYIYPYSAYMTLVRANGKNLLVKVTISAAEKIKSGQIELSEYVQQRPEVKKFEKILINKLAIGQLVNNDGNLIYLTSYEFYHNAKQLWLPTEEADLISQLNKDSSDEDLIKGFDILTSPAILKRFPFYELDLKKLVNIRDKFIAVENKFDILMVILKALQLDAAQQKPVKMIDKKSADWKDYRQRGGIKLSDTSEIIYQSTTGIFEKRVKISNLL

SEQ ID NO: 1091 - protein, 1163 aa, Chlorobi bacterium
  SITE 1158: note = misc_feature - Xaa can be any naturally occurring amino acid
MERSLGLDIGANSIGWAVIEQNGTGGAILGVGVYTFPEGVENFGEGDREISRNATRRAARQRRRQLFRRKLRKRALLKLMATHGLCPALSEDELRQWHKSGQFPERTEVQQWIKLNPYHLRLRATQERVTLYELGRIFYHLAQRRGFPTSSRRAQQDERSTIEKGDVKAGKPGIEQTRALLDHAPTLGSALATLYPPEGQPYRNNTSRIRNRYTDRQMYVAEFEFLWEKQRQFYPYILTDDLKAQLGGRRKDGYSIDGVLFLQRPLRSQKHLLGRCTFEPSKPRCLRSHPLFERFRALQFINSILCNDLPLDADDRSRVLRLMLTKKNLKFTDIRKAIGKLSAEYIFNYADDDSIVGSPTNAALASKNIFGKAWFDKSDHEQHQIWHVLQSFDDRDKLIHHATTKLGMSDTAAKHFASVQLTDGYASLSLKAIRAILPFLEQGYPYHLAVALAGTRRALGPRWDQLDEEQRTALCDTIEGLVGSGVRGGYLDKLKEMLRTKFKLSDKELSKLYHHSQFRAANQLLNRIPTDAVYTSQLLALRNPAVTNVLFASRRLVNELLSRFGHFDRIVIELARDLKRTKSQRAQIRKEQQRREIINRTISAILEKEGIRPTAENILKYRLWLECNKTCPYSNRSISFHQLYNGEVQVEHIFPYDRSLDDSYLNKTLCFADINRKKGNRTPYEFFTNDFGMDRWEEVKQRLRQTFTNQRSWQKDSPLDYFPERRKKYERFIAEKLPSDFVGRQLNDTRHASIRAVEMLQLVCPIVSASAGTATAKLRNLWGLDRVLGDLESDTKSRNDHRHHALDAIVLACTRPAHIQQLATANARKYSKEPQLEPPWSSFRFDVEDAMQRCIVVHHRTNRVITRLNVTTTVGGTVLRYRSLAARGPLHRETFYGKHLDPSDGQVYYHVRKPLAQITKRAQVEKIVDRAIRELVEARIKELGSYGSNDDVPKGAFFGTNPDGSPQPLLFLPNRRGEPVPILNVRLRESLANARPVHPNQNRYVDPSNNHHAIIYRLPDGTLEISVVQFWDAVLRCRLRQPLYQVPPNCELVMTLHINDIVLLGCPDKVLEEVFQTLTPDQRCKSLWPYLHKVQKLSQSSPKSWELCFRHIADARPSEEAKKDYILIRNWGTGKQGWFTYNPIKLRVTPSGLIYRWXELPHH

SEQ ID NO: 1092 - protein, 971 aa, unidentified
  REGION 1..971: note = NCBI_LFLA01000003:307495348918_23
MFHIYGYFCYNDIFNYLVKLFWGKPVDRINYRLGIDLGTNSLGWCLLKLNEKSIPEKILLAGARIFSDGRDPKSGSSLAEARRLNRGARRRRDRFLGRKGALMQKLVELGLMPKNKYERKKLEVLNPYELRAKAIENSLAPHELGRALYHLNQRRGFLSNRKTTTKEEGQKIKPDIDGLKEALDASPARTLGEYLWLRDKNKQRVRARIDEKLYPTRALYRDEFTQIRSCQLRHQKLTGDEWQALETIIFHQRDLKTPEPGRCQLEPNEYRARAALPSFQKFRIAQDITNLAWIDEKGGKHFLTAEQRKKLWNLLHKQKTVKFGKVRTTLELPEGVQFNLEDEKRKDLKGNVTAKLLSDKKYFGEKWFDFSDKIRDQIVEELLDIEDEKAVIQKAMNTWSVSEEQARNLASLLPEDFPKGYCRFGIAVLQKLVCCMRDDGLRYDEAVKKLGYHHSNNRPDELVEKLDYYGKMLPKAVAFGDPDEASPEKKFGKIGNPTVHVALNQLQKVVNDIVTTHGHPQEIVVELARNLKLSKKRKDDLEKEQRKNQKNNERIEGELKILCLENNGPNRLKYKLWEELSSDPNDRLCPFSGEKITPVNLFSPQIEIEHILPLSKTLDDSQNNKTLATREANHLKHDRGPFKAFGAGDTGYDYGDILDRAHQLPKRKFMRFLPEAMERFDDENQFLARHLNDTRYLSTVATEYLSHICRTVRVIPGVLTAMLRHKLGLNDILGERGIKDRNDHRHHAIDALVTALTDQGLLQRVSQLTGAGLLEPSEELSDPVKPRLKAPEVWAGFHKEAEEKINHIVVSHKPDHGIQGPLHEDTAYGIIQHPSSWEKENGYNVVRRKPSSDLSRNEIGAIRDPDLREKFMNFANTFENDKELKLALPDFAKNLGVLRVRVLKKEHPIIEIIHQSTATKPQSQKRNHKKGLAPGPVHHLEFWQNPDGALHQGVGRVSGSIFSRPIKMIRS

SEQ ID NO: 1093 - protein, 1557 aa, unidentified
  REGION 1..1557: note = NCBI_LFLB01000022:248971291537_11
MKIISPIAIDMGAKNTGVYLNHFEQGEDPTTSGNIAGKTIVIDSSKITWSQAGRTQKRHQVRGNKRRKLAKRLIKVILKSHYELDIEEKQLEFLMGLLNRRGYNRIELTPEQEEVLSTKAVTEFFFPRLFTEPSTGVSLLDGLSDRVIIKNKDNQDYWKSVLKDDVFSLSGKQNKEFKDYLALHDKGKDKDEIADLSKAFTAIKQVIGKQIENYDSGHLHRRDYLENIKKDVQNELLKSLLSGDLTAEKLSFLIGNVSNLQLRVLRKYFNDYGMQSGDKWAPDKLHEFFFKWVRSWHCKQDDERTNQRTLLARKGKDILEVFTTSNPELSIPPYEDQNNRRPPKDMTLRLKPKGLDNKLSNWESITRSLVKSYCMPQTEKNIIEPVCIQKNLKDNVRPQKIKGEVQDTEQRQILADTLHRILDRTIKLDPYKLRWLSEGSKTDEAQKAKEVLNRHSENKADAIIDFAKEYYDEVDIAKQGLWSDSEQSLFFRCNTNPPHKNKIQHNLISHILGENLNEQRLSYFVDDCWNEKIGRLTIKGIAKKTEEERKKYGNRFKHLVQRQVWLNKQGDRELDNERKHGVNGKVILEVHEKCLKATDKIAEYFTHNDRKKKIYANVFSMAQLYNILETNIRGFSKTDNWNTIENAWRSRKDDADEQGEYIANAVRLTADSIRPFDGMLDRIISRQAYEIAGMKIQQIGNLKIDTNDTLFVPIFMEQNRFSFEQSLHEIKGLKNVKKKAKERVEKGLKKQKTQWQNKDDRIKKNKYCPYTGGIIGKGEIDHIIPQSESKKRGDVVFNSEANLIYCSGTGNHTKGNVRWTFEQLHPNYLNEVFAGETNIKQTIIDFVNGLDENDPISFHNLEGKEQNYLRHALFISDLDSKTFPILNTRYKTFVNGTQGYLGKKIRKLLQDKYPNVEIKTYQIPAQEVSQLRKVLGSLDKTSKKQDIQSAFSHVVDASLVLATALQNPKIAEELQSTNVTELSEQGQWLKALLPTHADVQHIERKPKYRKNLSSTQIFKEGLYGERFMPILLDNEKLYYGFSLDNCHEIEPLKQPKNHSKDFDKKVLTVKEKQLVAHNKYFDLLKEFLYTGSSRRKNKKPVTDSMQDNQDKYSYLSIDTIKALNHLQKCAKEVCDTRATEQAKKLEKLRYSVEKKNIKNVLLQGRGRRTFIKQLDDKKFKVSKLTLPAKKDWERLINHPIIDYQGNKVTLKECFDKPEQVEIDNPKMVNFWQDLSQESGFKIEYLKDNLLKKNDKGEFYKQLGIIPKGVFDQKIKTMKLLKPLANSALLEQSFGVEFKTMTDLIPQESWDKLFEEFFHTNKIKNNNFHKQVRKDYSLPEVSAPSGGFRIQRKNSLTNETIYQVSAIADGGYACGFAKKKDGSIDMSKNGVTFNPALKASRRTAYIGKSGKPYIHKESDSTEVESFGSSREVALSSESVLKCRLTLAEASRIDVAITISNDIFKKIIEFSSEDIDVSQPPPDFSIKFTKSNGGREEHDKFKEFLNAMNIPTPREAGNPQRWAYKFEVQASQDTVVLSYRTSMTAELKTAYLNGTLVND

SEQ ID NO: 1094 - protein, 1134 aa, unidentified
  REGION 1..1134: note = NCBI_LFLB01000039:70141795_4
MKNCKNFSFDVGMTSLGVAVNENGEIIHGDVLLMHLDAGSVKAQAGRRRMFRTREAHKAREAVLESLWRSIGKEPLQRKRFTKITGPSGKTTFQKTKADKRLEREFPAKGDSTVYASSLLRIMLLEGEPLEDWQIYKALHAGIQRRGYDQNVPWKTREEAREKEQGRKPGSEKKKKEENPENQIDQFNQDLQEMAPDARYHLPCYYDAWKMGLWDAQTKKIIHIRQQSNSTHKARKYNASRASVTNETKKLLSQAAEQIPELNEHLTEDKLDQLLYGGQQNALDKRYPSATKIDGLLGQKYPRFENRIVSECALIPRLNVCKSEKSLAIEVGFLLRLVDWRYETEDEHGSKSEHSLTGQQIINKFQECDSAWKKKSQAYKPEEYAKCFKLTPSKVAKMAEKLGGSVKTGHEDIPASRHAGRSRFSQPALHLMKSLILSEKTPKGFYEELSQIVATQEKENPGAEFGYQIFPDIPYKYFLDDFRFLEKMGNSRDTIHVPDMSLAERYLNEYGDVESAIQKVINSCNWPELRHRLNVFRRELENLIKKYGTPDAVHLEFIREDFLSPKRKNEYSKRAKTGNEDRQKAIKTLKELKIPITEKNILRYRLYTEQNKRCLYTDDSIDISALESYDIDHIFPKEDGGPDAYYNKVLTSADVNRKQKGKRLPCECDFINWAAFKTRLKNLHLGNNKKKLLLASPRKEAEELVEKYTGLSGTAYIARLARDIVCLRFGWQPGAEGEQQRIFVISGGLTSKVAKKYKLYQALGDGSKHYQKDRSDHRHHALDAMVISYLRQWARDKNKTDFFKFPAGVNADYFAKKLACVNPHYVTKMRPALAEQPKPNRSAGKNKMNKKEYKNLSKDPEERGQWYTNKSETGKGTSQHGYLFYKDDKGKVCHKTIHSFRSPYEVKKEVEKKASKIIGLFYQGKSIDLPSQDQITATQLGRDARLKFGEYMIIKILKKEVIIGDPKQPQEQSKDTNSTGRYRIPFADLEKIKVCNELKREKPFDLDGFSVDKDKTLTGTYRVDNGQPSLRNFIIIDTKTSEEKLVNFASLVKYLAEKNWLNDLEVKDIVTINKNHISYINKVKADNLPNQNLPDGRYQIKRFESGGNEVCLVSQNGTVYRMNSKVLEYAKRTD

SEQ ID NO: 1095 - protein, 1669 aa, Chryseobacterium sp.
MAKNILGLDLGTNSIGWALIEIDHENKIVKIKGLGSRILTMDAAEIAKFESGAKIESGAAKRTTLRSPRKLNERYLLRRDRLHCVLNLLNSLPQHYKLSIEFENEKGKRSGKFKKGAEEKLAYYKDDNRKFQFLFKDAYYQMENDFKKKYPEMFYQRKNGNETKIPYDWTLYYLRHKAVTDKDFELTKEQLAWITLSFNQKRGYEKVIGQDEKMQKEGELTDNFVGKVQSITKIENEEAYLIVLVDNNNEAIELFKYKEETKIPITEIGDLKEVEIVSKYDDEGTIDSKKTEYIINEVREFLITDVRNTGRKIKENFIFEVELETGWIKEQQSKFTPKWKDTNRDFIIKTKYDENGIRIPKGADKGRNINIPKEEDWTLMKLKTETSLTSFNTKNNTKGVASFVYYNLLQNPKQKIKADLITVIERDYYREELDVIYKNQEKFHPELKNRDLYEQAIQLLYPNNPNHQKTIKELDFNHLIKEDILLYQRDLKSKKSLIANCIYEKENFERTDEKTGKKYKNPLKAIHKANPLYQEFRLWQFIKRLKIIKKEEVINEEIKINLDITSQLLTNELKEELYAFLNERESVTEKDILGFLNKKYKDLDINTENYKWNFASEKEPCNPTRYNFILRTKRIKGFDYRTFLTPENEYSLWHFFYSVKKKDEFTKGLTNIISRLLDKSGLSKEFHEDLVKNFSSFGGYTNDYGTYSEKAIKKMLPFLRLGKYWNSKDIENILSKTNHEVKQKVLDKEEINGEIKDFQGLWVSSACYLVYGRYSEVGEVQFWQSPYDIENYLKNEFKQHSLNNPTVEKILVETLHVVKDIWKYYGEEIGKDEEEKIIYNKLFDRIHIELGREMKKNNKQKERDDKQNKENRKANERIVELLRELKQNNSSLQEKSPFQQEKLRILEESLLSSIEYDKDNTEYQLSNGKITKKEIKEITTKELSKVSRSDFERYKLWLDQRYQSPYSGRFIKLSDLFDRKKYEIEHIFPQERITLNALYNKVICETEINKEKKASTGYGFISNAKSKKVFCSAHDSEIEIIGIKDYEDLVNNNFSGRKREILLSKEIPEEFTNSQLNNSQYISKMAMKLLSNIVREKGEDTFRSKNVLATNGTITTTLKRHWQLNDAWNEIISPRFKRLNKLTNTNLFGDYREINGHKVFINTVPEETNKNFDSKRIDHRHHALDALIIALTTENHVNYLNNISSQESSEEKLNTRKGIKFQLTNSRRGFNDEKEWYFLPPAQIKTKDGIDEFEYQFKDIKSKVFKDIAQNALENTIASFKQKNRVIRQRWNKYLKSEDGKLNIIKQDGLKEVVNYNVRKRLHEDTFYGKVKLQDKITTIGLEKALIEKYDLVDDELIKEIEGLKNIDGKSLKEIIGLLKSKHPKVSVYEKFVATRFGNNLETFASVPSDKIIKAIHSITDTGIQKILENHLNNYKEVVDGKTKFDVENAFSSDGVKELNKNIVELNNGKVHCPIYKVRTSDAMGTKFSVSEEGQKSTKFVVTAAGSNSFCGFYQKNTERKFYIPTLRESVESLKQGFEPCPATHPEDSEFKLIFVLNPSDLVYVPTDEEKENPKLIDFNNLKKEQFSRIYKFTDGSGTTMNFVPANIASLLFNMSNKEQEKTEIKLSIQNELGLGSPQSKNQNTVDGIQVKSVCLKLKVNRLGNISKA

SEQ ID NO: 1096 - protein, 1031 aa, Aquabacterium parvum
MAKMRYRLALDLGSTSLGFALLRLDEASNPCAIIKAGVRIFSNGRDPDGNSLAVTRRMARAMRRRRDRLLRRKARMMHLLIEHGFFPKDPEARKALETINPYELRARGLDESLTPEEFARALFHLNQRRGFQSNRKTDKKDNDNSALKSAIKRLRDALAEGQGRTVGELLFRRMQTGQTVRARYRESKALKPDGKTKIDKSYDLYIDRAMAIDEFEALWSKQASLNPDIFCAAAYHELKECLTKQRPLLPVRPGRCTFMPEEERAPLALPSTQRYRMYLEANHLRILREGLHEEVLTLTQRDALVQALEHNPKRTFVQIKALLGLKGAVQFNFEDPKRQELKGNITNAILSKPGHFGQSWFTFDEAKQDDIVSRILSEEDESALIKWLLLETGVNEAQAEAIANVGLPEGYGSLSRKALARIVPALRQEVISYDKAVQAAGFEHHSQLDASAIGEQHPTLPYYGEALQRHVSFGTLDANDPDEKRFGKIANPTVHIGLNQVRTVVNDLIKRYGHPSQVVVEVARDLKQSRQQREETNKRQADNQKRNARIRQEVAEASNGSISPERVKVADIQKWILWEELNENDVLNRCCPYSGARISALDLLSSDGRVEIEHILPYARTLDNSLNNKTVSMRWANRIKGNKTPAEAFGQNQVESCNYEAILKRAEQMPKGKRYRFAMDAMERWDKEGNGFLARALNDTRYLSRITREYISLICPHATRVIPGQMTALLRHQFGLNGILGLRGEKNRNDHRHHAVDACVIGVTDQKTLQELSNASKRGRDQHIMDWAESMPDPWPTYREQVKRAINHILVSHKPDHSHEGAMHNDTAYSLLGNGRVGVHKLVDGKRTLVEDTLKVIEFDYAKAKHSTNEPWFDSDHNHRSGAYKGYKGDSNYCIEIVSNDKGKWEGEVISTFDAYQLVRKERNAGRDGVSRLRHPTLSLSGKPLVMRLIRDDYVKLETDEGMKLMRLAKLAADGRMFWVEHNEANESARARDKEDAFTYTVKTPVGLQKAKGRRVTVSPIGELRDPGFKG

SEQ ID NO: 1097 - protein, 1012 aa, Limnohabitans planktonicus
MANMRYRLALDLGSTSLGWAMVRLDAQNETCAVIKAGVRIFSDGRNPKDGSSLAVSRREARAMRRRRDRLLKRKTRMMATLMKHGFFPQDEAARQALVNKEPFALRAKGLDHALLPEEFARALFHINQRRGFKSNRKTDKKETDSSALKKAIGQLREAMQASGCRTVGEWLCARHQQGLSVRARYRENRITKDDGKTKIEKSYDLYIDRAMIEAEFDALWAKQSELNPELFHETARAELKDCLLHQRPLKPVKPGRCTLLPDEERAPLALPSQQRFRIYQEVNNLRLLREGLNEEPLTLTQRDQLIQALETNPKRSFTQIQKLLGFSGQFNLQDDKRTELKGNSTSAMLSKKEFFGSQWLSFDETHQDEIVMQLVSEENEARLIAWLQAETGVDEITAERIANTPLAEGYGSLSAKALEKILPALRADVITYDKAVLAAGFDHHSHISHAATGEILPDLPYYGQYLQRHVGFGTGKPEDPAEKRYGKIANPTVHIGLNQVRTVVNALIKRYGHPSEVVVELARDLKQSQEQRKEEQAQQAKNQRRNERMRQDIAGLLNTSTERVRALDLQKMILWEELSFNVADRRCPYSGVQISAQMLFSDQVEIEHILPFSQTLDDSLNNKTVAMRQANRIKGNRTPAEAAADFAAQGWPVEDMLHRASLMPKGKRYRFAQDGMAQWLREDKGFLARALNDTRHLSRVAREYLSLVCPQGTRVIPGRMTAMLRAKFGLNDILGLNGEKNRNDHRHHAVDACVIAVTDQSMLQKFAKASASAREKQLNKLVESMPLPWDSYRDHVQRAVERIWVSHKPDHGHEGAMHNDTAYGLLGGGHVQVRKRMDGVRTRETAALKVIEFADRQAHPRHGLLPNGEPMPYKGYKGDSNYCMEIVRNDKGKWEGEVVSTFEAYQLVRQHGLARLRHPALSVSGRPLVMRLLRNDTLRVIHNGEQRTVRICKMTAEGVIALADTTESNVDARTRTKDLSYIFKTAGSLQKSKGRRVAISPSGEMKDPGFFD

SEQ ID NO: 1098 - protein, 1044 aa, unidentified
  source 1..1044: note = candidate division TA06 bacterium 32_111
MKYTLGLDLGYNSIGWAILENDENGSPIKLFNAGVHIFEPSIEDIEIDGKGKTKNVKRREARLRRRQLFRKTKRLEKLLNFFIQEGFFQNQKVLINDPFERAEFLYQLDKKSRNPYILRREALDNRLSLEEIARIFYHIAQHRGFKSTKRELAEMNKDEKKKKEDGIIQSEINTLKEEIKKNSCRTLGEYFAKLFENGEKIRGRHTDRKMYEEEFQKIFNKQKEFYPNIFTDEFKKKLYKLIFHQRELKSQKDKVGFCSLERGKKRAPLALLVSQRYRYMCKVNNLNVIDTETGENRELTVDEKKKLYEKLENSEKLSFKEIKKILNLSEKRYIFNLEKSEKYIIGNKTNVKMKNIIKDWDNFDEDKKNFFINEARTVVKIETLERRGKKLGLSDEESKEFSKVVFEDGYLNFSKKAVEKLLPYLKEGKKEYEAIKLAYPENSVQNDNLKELDFLPPIKSKELKKYFEVRNPIVEKALTETRYLVNFLIKKYGKPETIKIELARELKLSNKQKERKHKENQENRKKREEVIEKLKNDLKISEPTETQIQKYLLAEECDCKCPYTGRSISMDSLFGEHPLFDIEHIIPFDRSLDNSFLNKTLCYSEENRKVKHNKTPYEAYYGTEKWEAIIERVKKFKSNVRNEKLRRFQMTKEDVENYIQNFSTQNLNDTKYASKLAKKYLGLLYGSINEDGIDKNRKRRIFASSGKVTSTLRYALGLNTILNDENIKTREDHRHHAIDAITIALTDSSMIKKISDASKREKNINSLFKDFQAPWENFRKEVEEIIAKMNISIRINKKVSGQIHDETFYKKPFKEEEKSYTHQRINLEELTIKDEDKKKQSSKLIDNIVDSKIRNIIINSLNGEKPKIRFKDPKDHPYIIQKNGKKIQIHKVTIKTKLETYNEIGPEKAKRYVKSSDSHHIEIFEDLKTKKWDGYVVSLLEAYERKKKKLPIVNKNLGEGKKFLFSLAKGEIIELDTENGKRELFVVRIISASNNQIKFTRINDSRKITDIPATGLTACPSSLKKRNCKKVVINILGEKHYSND

SEQ ID NO: 1099 - protein, 1427 aa, Lactobacillus delbrueckii
MNKKLDKEYTVGLDIGVANNGFVAIDDDFNIIKHGHRHEIGVTEFKKAKTAESTRISRGSRRRYRHQKWRLKQLKDYFMPHFIDLMGEEETEEYFKGFKDSWVSNDDDLRKGRRKNFNSEIKEFPTRYHAALALINNDSQVPTDPKKRLKLIYEVIHPMVKYRGNFLRKEKVDDLDLGELDIDSSLTRINLLLKNIKTSDESATYTINTENSTEIRGILLSKEYTRSNRKQKLTKCLETTDSDKAVVEVIATFLVGDEVKRVKIEKVFGVDASSILNSKGNPVSSFSLNPKKDGNLDNISKLTELLSSSGKEILDELKTIYNQVTLHDLIPLGKSYSEAMVESYDKFHKQLVLLKAVMKRLDSEDKIKLEEKLDDYLNFKHRGSKKSSAADFQKAVIDTLEPKSKDKDKKKQKEKYQDDPDIQKLVFLADNELLLLPQRNYKNGTIPHQVHQLELRRIIATQSQIPGFEWLADNDLISPKRDEKYNLERFIDFRIPYFVGPLTTNEHSRFAWLVYNENVKRETLTVWNFEKQIDYDKTIENFITRMTATDTYLLGEPVLPAKSLTYQKYEVLNELNNTRISKRPLSVEEKQAIFNDLFMKQKAVTTEQVANVLRCRFNRSVKTSDITGPSNGVDYNSSLSTYLTLKKIKGIDDSLLTSKKYASDWDKLTKYLTIFEKNDVVRKEARIKKLKLAQVENFPVKEIASLSLDGWGRLSSLLLNGIYIGNRSRKESIMDLLWRTKSNFQQIITKEECQKQISNYNQKYNDLPSKNQKINSVLKLSRISPENERSIRVCINIIEDLVRFNGREPKLIALEFARGSHKVNNAPKYSRIKKLIEEQITTSEWKDTLQNEFKRFKTPKDFGIKEYLYFSQNCKDIYDPSHTINLDELDRYEIDHIYPRSINGKDDSLDNLVLTQSKNNQKKGNLPAVKVFSNKAVSSYWTKLKDNGFISEDKYNNLNRDWIDNATNQFKIRMLKRSFVQSSSIIKVTAQILTMLYPNTKIVAINASLSHRLRSTFNLFKVRNVNDFHHAVDAYLAAFEAQFLWKLYPKLRPLIDYNDYQKLDSAALKDVDLQKFAFLALTDENHHLVHGDMIVNSDGEIVGRKSKLIKRLTNLRNPDNIRIVKMPTKAEGGLFNSTINHHSKNPKKAVPRKKNMSPEVYGFYSGTVTSKIVLIKTVKQTKDGKSNQYSLDKLTNLSKSDEENAISKLVDAKLNSKTTLDKVITLPINTLFERKVPVTWEDGEGHQHQKLTTERILLSSDEEYHNFNGFTLSDNAMSFLQTFNSNESDKVIAKKLIEMQNEYRGYKDANDALNQIFDEILLKCKLELPLISQGHKPFESLSSAKAIKAFHDYSSDLSKKLQDIESILLAVSDTSRLELSSLNSVKGLKGTLGRFNRGIKSHLMDDTVLVFRSATGLFERKIAFKDL

SEQ ID NO: 1100 - protein, 1410 aa, Chryseobacterium sp.
MTKNILGLDLGVSSIGWALVQENSKNPENNKIVKLGVRVNPLTVDEQINFEKGKPITTNASRTLARSARRNLQRFKLRRANLIDVLKKGNILKQGDLLTEIGKNSTFQTQELRAKSAKEKVELSDFVRILLLINKKRGYKSSRKAKNEDEGQIIDGMAVAKKLYEENITPGEYSYKLLQEGRKQLPDFYRSDLQAEFDKIWNFQKQFNPEIFTNELYKRLQGKNRNATWKELEIPFYLVGIKQIGTMQEKKIERYFWRSEAVKKQLDFESLAVVFQEINSNLNNSSGYLGAISDRSKELYFNNQTVGEYLYNQLKINPHTKLKNQVFYRQDYLDEFEKIWETQAKYHKKLTKELKEEIRDIVIFYQRKLKSQKGLISFCEFENREIEITVNGKTKKKTVGLKVVPRSSPLFQEFKIWQRLNDLEFKNVETKEIFPLELEHKEILFGNLNIKGNLSSKELIEQLGYPSKEWKCNFKEIDGNKTHENLYTAFLKIIANEGIEFPKEFKLSIDDDIKVSKIDVSSEKIKEFIKENFLKLGINTSILDFNPELDGKDFEKQESYQLWHLLYSYEGDDSASGNEKLYELLEKKFGFKREYSKILADVGFSQDYGSLSSKAMRKIFTYIKENKYSEACHLAGYNHSKNSLTKEQLANRILKEQLEILPKNALRNPVVEKILNQMINLVNEVIKEYGKPDEIRIELARELKKNAEERANMTSDISKATLLHQKYAEVLQKEFGIKAPSRNDIIRYKLYLELANNGYKDLYTNQKIEKENIFTDKYDIDHIIPQSRFFDDSFSNKVLVPRCANQDKDNYTAVDYIEKKYGERGKEDFLNRIHLVFKSKEAIAGKSESQISSMNTKFLKLQKKGSEIGEGFIERDLRDTQYIAKKAKEILFGITNSVISTSGRITDKLREDWNLVNTMKELNLEKYRKLGLTELIANSKGEEKERIIDWTKRNDHRHHAMDALTVAFTTHNHIQYLNYLNARKDEKHKEHHNIFAIENIITEIVEKKNGSKERRFKLPIKNFRTEAKKQLEEVLISHKAKNKVVTKNINKTKKKGGVVSKIVLTPRGQLHKETIYGSAKFLKTKEEKISGKFDLETINKVQNEKFKNALLDRLKEFNGDSKKAFTGKNVPAKNPIYLNEQKTEQVPESVVLAWYETGYTIRKAVNADNFKDYKNLEKIIDKGVKEILKNRLNAFNGNAKEAFSDLEKKPIWLNQSKGIAVKTVTITGINNAETLHYKKDHFGNELLDENGKKIPVDFVSTGNNHHVAIYEDADGNLQERVVSFYEAVERVNQGLSIIDKEYNQDLGWKFLFTMKQNEMFLFPSEDFNPKETDLFDEKNLNLISKNMFRVQKFGSLLSGFWFRHHLETTVDLNSSLKDTSYKVIQSCNNLKLIVKVRLNHLGKIVQIGEY

SEQ ID NO: 1101 - protein, 1512 aa, Chitinophagaceae bacterium
MAKILGLDLGTNSIGWSIRETDSNSRMEYYQVYFRELLEKIKETQSILDNEIIDYGVVVFQKGVGEGKSGEFSLAAERRKNRSKRRLYNAKRYRKWELLKVLIENWMCPLTMEELRLWSIGNWQEVGGRKKNTGRIYPLGNEAFQKWLAFDPEYFGEKEISENGKVIRKNPYDLRFELISSEETNDFAKKQKVGRALYHLAQRRGFKSSRKSGKSTYAENAELEKLKQRNPDFQITMLAKEKLENGKRFRASGVIQRRYFEDEFYAICQKQNISDELTAKFYKAIYFVRPLRSQKGLVGNCTFEKGKARIPVSHPKFEEFRALQFINNIKWREVGTQTYEAIPISLKKNIFEELFFRKLTSGKNKGKTITETYFKFDEIVEKYSENEKYEFNYKNKPNISTCPTIAVLMNVFDAEWENKFIADENSYGINWEGLSISYTVKYGIKEGENRKLEVDEIWHLLFDYIQTKDNAEELEVFCKNVFGFDPDKARAFAEIDIQQGYGSLSYKAISKILPFLQSGFVYPEAVLFANLKKVLGDTFEVNKVQAKRIIDDAIKETSAIKEKRNIVNGLIQQFFAEHNTNRAKGIDNTIKEMAAQDTLNKLKKYFGESDWNKKTETEQRLWEDEILNLYLKFLEGKQIKEEKASVQLGKNPEIDYYKLPRVDESIKQCLKASFNLPDDRLRHLYHPSDIEMYPRSKSEIEVRINGVEQFVKQLESPQPPSRGWKNPMVMRTLHELRHLLNCLLRIGKIDYETKVVVEMARELNTKNYRKAYTDWINDRDNENKSFKASILEVYQITEPSIDDYNKFRSAVEQIVNTELIENKTTIFQNKYQEFIDTYLNTIKIPENNKDELMSNEYYDYLMYLILNRGEFRKMLNFKIPNSNKWQTQLIATSSSFEKKWKELSEMLTKYRLWKQQKFQCIYTGQQISFTQLFTENYQIEHTIPRSISFDSELKNLTVCDSAYNNFVKGNLFPTECPNYETAKVCKTVKGDITCFPIKDRVEESIFPKVKELHTRIKNLDTINKGLNDEEKKNANIRLRYYLKFELEYWERKLLTFTIKKGDWKDSWKNSQLVDTQIISKYAKAYLKSIFEKVDVQKGSIVNDFKKIYQIKGDGQKDRSWHSHHAVDAATLTLIPGSASREAILKEYYIALENKKKYHAKPYKGFQTSHLLDIEKIIVVNHISHDKTITESFRNIRKRGFKTGWVAQGDSIRGRLHEETYLGAIKPNEVKDEGKAIKDPISGKYLTKQLNGKDVIWVVQRKKIEDVDIDVIVDEALKAHIKWQLGNGVKINEVKDFAGNTIRHIRFKKFSPSYDKAIQVKPHLFSSKYGHKNFYLANNEINYLCLLYIGKDKNGKEIRAFRFVNLFEFSKMKDKRINLLFHNEDYNVFVKVNRSNEYKLNIKCILKVDQKVILYKSSIEEIDKQNLDNYRCRIFKIYKFNNSGSDYIFLQNIIEARNDDGLIKAGFTKDGDTEFKPKQYQPRLKLTADNFNCLFEGVDFEIKPDGTIKWIKS

SEQ ID NO: 1102 - protein, 1066 aa, Clostridium botulinum
MVNEINYSLGLDIGTTSVGWSVINLDLNRIEDLGVRIFNAAENPKDGSSLALPRREARGRRRLLRRKAYRIKRVKKLILDRKILSQNELNNLFVNKDVISVWNARIKGLNEKLSGEEWAKILINLCKRRGFKSNRKNEMKDKEAGKVLSSIKSNFEKMKETNARTIGEFIYNEVMTSKDNYKALRNKSEQYNMCVSRDMIREEIHTLFEKQRAFGNEFAKDEIEDEYLNIFNSQRPYSKFEDLEKMVGFCTFEKKKYKRAPKNCISAEEFVLYEGLNKLSIVNSGNKRKLTNNEREIIIKEAFKRKEVKYTHLRKILNLKEEDRFLTLTYSIDKDISKTENTKFVSLKGYHEIRKSIEHGVSKEYWQQIKDNKKMLNDIAYVLTLGKTDEDIVKQLKLRNILDEKVIESLLDISFSKFNNLSIEAIEKILPFMKEGYQYNDACEKAGYDFKAIYKGVKLKKLPVIDIDEIVNPVVNRALAQGRKVINAVIDKYGSPTRINIELARNIAKNFKDRKAIEREQKENRDNKEKIREEIKNLMGKEPTGSEVLKYRLWEQQRWECAYTQQPISIDQLFTSGYCEIDHIIPFSRSFDDSLSNKVLVLGVENQRKRNRTPYEYFGEDTERWNKFEIWVKGSHLNYKKKMNLLKKKFSPEEQREWKARSLQDTKYICRYISNYINNRLEFRESESKQKVITINGRATAYLRAKWGLIKVREDGDKHHALDATVVAVATQGMVQKISKYSKAHELKSVRSCDGVVDVETGGVVETEEFRNTLKEILPRPWRGFSEELVLRLSDDPIAQLKKSPIKSYDQEFIKNTVKPIFVSRVPFRKIKGRLFGETVYSKKAFKDGYFISKKKLIDLKKDDLDKFYNYNCDKKLYDAIVERMKKFNYNAKKAFEEEFRKPTKSGDKGPIVRSVKVKVKIPFKDGVEFNEGLVAKDGMARIDVYEKEGKYFSVPVYKYQLAIGIIPKKAALAKKTEEEWTIMDENYKFKFSLYRNDLIEIKYKNKNDYLGYFEGFDINSAVITIKNHDGSKRYRGIGIKSGVKEFNKYEVDVLGNYYKVKAGDR

SEQ ID NO: 1103 - protein, 1404 aa, Chryseobacterium sp.
MAKKILGLDLGVSSIGWAIVEEDAENVMNNKIVKLGVRVNPLTVDEQINFEKGKPITTNAGRTLVRGARRNLQRFKLRRLHLIDILQKRNILKQADLLAESGRNSTFQTQEIRAKSAKQKVELSELARVLLLINKKRGYKSSRKAKNEDEGQIVDGMSVAKKLYEENTTPGEYSYELLKSGKKQLSDFYRSDLQAEFDRVWNFQKQFYPEIFSDNLYKELQGKNKNATWKILEIPFSLVGIKQVGTTQEKKIEKYFWRSEAVKKQLDFESLAVVFQEINSNLNNSSGYLGAISDRSKELYFNNQTVGEYLHCQLKENPHTKLKNQVFYRQDYLDEFEKIWEIQSKYHTVLTKELKEEIRDVIIFYQRKLKSQKGLISICEFENREIEITENGKIKKKEVGLKVAPKSSLLFQEFKIWQVLNNLQFQNIESKEIFPLDLDCKESIFNEVNIKGRISAKAVLDVLGYSGKEWKTNFKDIEGNNSNENLYNAYLKIIANEGIEFPKEFKCNLDDDINVSKIICSAGKIIEFVREKFSELGINTSILDFNSELEGTNFEKQKSYQLWHLLYSYDGDDSPSGNQKLYELLEKKFGFKKEHSIILADIGFPQEYGSLSTKAMRKIIPHLKTGLPFAKKSDNDTILSATAMAGYNHSKSLTTEELTKRVLKEHLEILPKNSLRNPVVEKILNQMINVVNEVIKEYGKPDEIRIELARELKKNAEERANMTSEIGKATIQHQKYSEILQKEFGIKSPSRNDIIRYKLYLELSNNGFKDLYTDIQIKREELFTDKYDIDHIIPQSRFFDDSFSNKVLVPRGANLKKGNLTAFDYLESEGKDTLEKFINTITEFYDKGIITKAKYEKLQKKGTEIGDGFIERDLRDTQYIAKKAKEILFGITNSVVSTSGRITDKLREDWNLVNTMKEMNLEKYRKRGLTETVINSKGEEKEKIIDWSKRNDHRHHAMDALTVAFTTHNHIQYLNYLNARKNEDHKQHKVISNIENLITKVFEKKNGSKQRRFLEPIHNFRIDAKKHLEEILISHKAKNKVVTKNINKIKKKGSIIAKIELTPRGQLHKETIYGSSKYLKTKDEKLSGKFDLETINKVQNERYKNALLERLKVFGYDSKKAFTGKNILAKNPIFLNIEKTEQLPEVLTLAWYETIYTIRKSINSDNFKDYKNIDKVTDKKVHNILTDRLREFNGNSKEAFSDLEKNPIWLNKPKGIAIKTVTITGVNNVEALHYKKDHFGKEFLDEKGHKIPVDFVSTGNNHHVAIYEDTAGNLQERVLSFYEAVERVNQGLSVIDKEYNSSLGWKFLFTMKQNEMFLFHSEDFNPQEIDLYDEKNLRLISKNLFRVQKFTVKDYFFRHHLETNVEDNSKLKGDTWKREGLNGIRGILKVRLNHLGKIVQVGEY

SEQ ID NO: 1104 - protein, 1371 aa, unidentified
  REGION 1..1371: note = NCBI_LIUG01000107:2583861111_13
MKCITKAAEMRKTVDIIVIFVRRILGWNERDRKICDYICYFTILSYMKKILGLDLGTSSIGWALVNEAENDEESSSIVLLGVRIINYDNFVSTKTGKESKEPEKDFAGGKGISPNAGRTLKRSMRRNLQRYKLRRENLIEILKEYKFISNESILSENGNRTTFETYRLRAKAAKEEISLEQFARVLLMINKKRGYKSSRKAKNTEEGTLIDGIEIAEELYDRNLTPGEYCLELLRKNTKALLPDFYRSDLQTEFNRIWEKQKEFYPDILIVQLKENLQGKNEKQTWAICREPFGIVGAKRNGDKGEQEKENYEWRAKALNEKIDLEYLAIVLQKINSQINGSSGYLGKISDRSKELYFNKQTVGQYLMAILDKNSNTSLRNMIFYRQDYLDEFETLWSKQAEFHIELTETLKKEIRDVVIFYQRKLKSQKNLISFCEFENRKIEVEIDGKKKIKIIGNRVIPRSSPLFQEFKIWQILNNIEVTDKNSGEITLLSKEEKEKLFAELQKAESLSTKKALEILFEKRAKNYSIENYKEKIEGNKTRAKICEILNKTLADEKLNELWHLLYSWESENSNLAEKLEKKYVYPSDIAKKLSNITFLDDYGNLSARAIKKILPHLKNGKQYNEACELAGYAFSKSSLTKEQIENKILKNRLEILPKNSLRNPVVEKILNQMVNVINSIIDIYGKPDEIRIELARELKKGAKEREEMAASIAYATKENERIKKLLQSAPFNIANTSKNDIIRYKLYEELASNSYRTLYSNTYIPQESLFTKDFDIEHIIPQSRLFDDSFSNKTLEKRQENIEKGNSTAYDWMAKKGEKELADYEIKIKNLFDQEKISRAKYNNLKRREKDIPDDFIDRDIRDTQYIAKKAREMLQELVRVVVPTTGSVTAHLREDWQLVNVMQELNFPKYERLGLVEEIENKDGQKIKRIKEWTKRNDHRHHAMDALTVAFTKYAHIQFFNHINSHYDSTSEIYGIKQKYFTNDNKALPPIPLKNFRVEAKKQLEKILVSIKAKNKVVTTNINKVNNQKTLTPRGQLHNETIYGSQKQNVVKEEAINAKFNEAKILTVTKLAYREALLKRLRENENDPKKAFTGKNSLAKNPIYLDNMHTKQMPEKVKTVTFEIVYTIRKPIDKDLNVEKVVDVKVREILKDRLNKYNNDPKEAFVNIKENPIWLNEKKRISIKYVTIFGVSNVEALHDKHDKDGNKQPVGFVSTSNNHHVAIYRDEDGNLQENVVSFYDTVKRANAGLPVIDKEYKQSEGWQFLFTMKQNEYFVFSNEKTGFDPKKVDLMNPENYHLISPNLFRVQKIASKNYMFRHHLETKVSFETKEMEKQLRGIAWELYQSTEKLKYIVKIRVNHIGQIIQVGEY

SEQ ID NO: 1105 - protein, 1327 aa, Flavobacterium akiainvivens
MSKNEVCRIYEIFFCSILTYFLKKYNHDIFKKSSTMKTILGLDLGVTSIGWAVIVTDDDNTPIKILGMGSRIIPLSTADKEEFQKGQAISKNQSRTIARTQRKGYNRKQLRKEELKKILGELGITPSKELLNLPSIELWKLRADAASGNAPLSAEQLGRIFYMLNQKRGYKSARSEANQDKKDTDYVAAVKGRHQQLKEKGQTIGQHFYTEMLTLEENSGHFQVKNNVYPREAYLEEFNAIIAAQKPQHAFLTDDVVDRLRDEVIFYQRKLKSQKGLVSICEFEGFERTFFDNVKQKDKTIFTGPKVAPKSSPLFQLCKIWETVNNINLKVKNTDGSKNKWADYVPTLEQKQEIIEHLFKNAGISLDALRKILGFNKDEIFVNKQIEKGLQGNTTYAEIHKILGDSKPELLGFNINIEPSKHSALLVDKRTGEILAEKEGQQVSAEIEKENFYQLWHTIYSIKDLDECAAALIKRFNIDPNVAAQLAKIDFSKGAFGNKSNKAMRKILPYLMQGYNYADACSLAGYNHSDSQTKKEKEENVVDDKLKLLEKNSLRQPVVEKIINQMIHVVNAIIDKYGKPDEIRVELARDLKKSKDERNEAELQNASNKKLNEEVANRLKELGLPVTKRFVQKYKFIFPVRDRKIKEAQLVNQCIYCGETFNVTEALSGDNFDVDHIIPKSMLFDDSQTNKVLVHRKCNAKDKSNKTAYDFIAAKGENELAIYLDRVDDWFKRGVLSYGKMQRLKVSYEQYAERKQLKKETEADIKLWENFIERDLRQTQYIAKKSKDLLKKICNNVTVTEGKITAQLRNLWGWDDVLMNLQLPKYKALGQTEIKEWTSEHGRRLHKKEEITNWTKRDDHRHHAIDALVVACTKQGFIQRINTLNSSDTKDAMDREIKAAKEKYNELYDKKLLTETNEQVKNHTERFNKLETYLKSQQPPLFTTRYVEQEADKIFVSFKAGKKAATYGIRKIKKDGKKVVVQEKIVVPRGALHEQSVYGKIKTQEKDKPLKYLFENPETIVDNRIKILVKERLDKFEGDVKKALTSLKKEPLFIDNEKNTLLEKAACYTDATVLKYKLQALKANQVNDIVDEGVKRIVKARLAQHKNEKEAFKDTVWFNQEKRIPIVSVRVFARPDASKLAIIKTDENNKPIGFALTGNNHHIAIYKDNTGKLVQHICTFWSAVERKKFGVPTVVKNTGTLWSELLHKDLPGTFLDKLPQDGLELEYSLQQNEMFVLGLPKESFEDAIKNNDLPLLSKHLYLVWSISDNDYWFRHHLETKNSELKSTTGAKESKRYYRFQSVGTFTKENPIKVQLNHLGEITKIGEP

SEQ ID NO: 1106 - protein, 1030 aa, unidentified
  source 1..1030: note = Alpha proteobacterium
MATELVFGIDIGTTSIGSTVLTLDRDAGHGELHHLGVRIFPEARDEKHLPLNHTRRQKRLARRQLRRRRVRRRTLNELLATQGLLPAFGAQRDSAWRAAMAIDPWPLYAAAETRALTAVELGRLLYHVAQRRHFQGRALQGDGGAGPGDSETAEERQAQSQRERDRAALRAAGTNIGAFLSAIPDGERRRGRHFAREDVRAQFVTIIAAQRLRHPVLADPVILGALTEAIFSQRPVFWRRGTLGRCRLVPGAMPAATASWLAQEKRMLEKLNDLIVEVGNGRPLDTAERHAVIALLRRQDSVTWGALRKALRLPPSNRFNLERGGEKGLTGNRLENRMAAIVGARWDSDAALRDSLRADLHRRLFAADYAEIGERIVIRDTASAARERAALADNLARDFALPVAAATALADIQQAGGWTPFSEAALAAMLPRLAAGARFGALLNGPEEEGWRDRTFPARERPTGALVRTLPSPADRDEQARLGAIRNPTVVRVQNELRKVVNNLIRAYGAPHRIRVEVGRDVGRSAREREEITTRTRKREAERRRAAADLVAQGIAVQSGRDIEKWLLWQECRRTCPFTGRAIGFEALFRTGEFQVEHIWPRERSLDDSFANKTLCHVDANRRKGNRTPAEAFDAADLAAMVERVRSFAGPPGLIAAKARRFIQPIPDDFASRQLNDTRHAALQVVTQLKMLFPDVGPTAEVRVQVVTGQVTARLRRHWGLADLLGDGDSKTRDDHRHHAVDALVVAAAHPGYGAALSRYFAARDSGVLEPQLPLPFPDIRAQAQAKLATLVVSHRVRRKLSGPLHKETVYGDAGPARGSGGKEYRYFVTRKPVAALTPSLLKDDEAWPDAHIRDTLRHWLAAHDGDIKKALTSGLPTVSTGGPEIRRVRVRVKQQAKLMATLKNGHADLGNNHHVAIYRDATGVHTEVVSLFEAAQRQARHEPVVRRQRPDGATFVMALSPGEIIHFAAGTRQGLWVVKGVWAAGPIILWRAADARGVSVWRPVAATILGDGGVKVQVDPIGRTRPAHD

SEQ ID NO: 1107 - protein, 1188 aa, Chryseobacterium indologenes
MKYILGLDIGVSSVGIAVISEENQKKTIENLAVRIVPEDPDFHGKFYSGNTASKNLERTAKRGNRKNNQRFKARRDKLYQSLKENNMFPTSNLFDLSAVELYGLRAKAVSEQVSLQELGRILILLNQRRGFLSNRKSVSEENSTEYKERIAGLEKALGNKTIGQKLYSELQENNNVFEVLLRERTYQRSSYTEEFDRIWDEQKKYYLILTGSSNEDDNKGTLYDLIRNRIIYYQRPLKSQKGLISECLFEKHHKAVAKSSPYFELFRIWQKINDLSWKTPNGELFKPTDEQKQKLKNALWNGDNLNPKHKLTVSKIKEILGYTSREKIYLNFTELDGSRTYSILRNALIEAGIEKPEQYLFFNMETNDEKGGLFELWHITYSLPIEKEVINALKNRFGFDKKQAEIIARRVGYSSDYGSLSTRAIRKLLVHLEKGLGYTDACDNIGYDHSGYKTKIDLQPKLKQLKRNELRNPVVEQILNQVVNAVNLIIEKYGKIDEIRVELARELRNNAKTRKNISLLNSKNKKNNDIIRKKLQEEYGFKFVNGRDVTRYILWEENSKECLYCNKTINGSDMLTGNADIEHILPKSRSFNNAMNNYIITHRKCNSDKGQKTAYDFMSSKGEVILQQYIEKVNDLYKDGKGSISKTKFENLLCKGEDIPSDFVERMKKDSQYIAKEAVKMLKTVCPNVYTTTGQVTDFLREEWKLKNLLQELTFEKYKAIGQVKEKIIKTNNGQTKTFKVIADWSKRDDHRHHAIDALICALTDQKIIFKLNNLNKIYQYERNALSQKEIEEIEEFLEGKFSIKEFSAQQGNIIECSIPNIRKDAQKHLENILISFKKENSKVLTMNRNQPKNCKEQITWVPRARLHEDTIMGRVKRIPEKKMKLNDKVSFEQIKMIVNPEIKEILLYRLAKFGDNPKVAFATKALKKEPIFYRENELKEVSIYEWVNTKRVALNENITDSQIEKIIDQASKRAVKERLNGGKIKEVFKNLTENPIQLKNGMILKNVTVTDESKVEKIRNGFAITGKNHHALVYKDENGKYNDKVVSFWEAVAIGLRNVTEYGNPYPIINRNHNDELGEFYFSMQINDLFVFDLKHSENPQEENEINFFDVENRKQISDKLFRVQKMSKKSNGQFVSDFRHHLETSVIRNDMILKNITWISISKNSDLERLTKIRVNHLGEIIKVGE

SEQ ID NO: 1108 - protein, 1084 aa, unidentified
  source 1..1084: note = Rhodobacteraceae bacterium HLUCCA08
MRLGLDIGTNSIGWWLYGTEGGRITEVVDGGVRIFSDGRDPQSKASLAVDRRAARSQRRRRDRYLRRKAALMKRMAQVGLMPADPAEAKVLEVLNPYELRASGLDGPLPLTHFGRALFHLNQRRGFKSNRKTDRGDNESGKIKDATARLDQAMMAKGARTYGEFLHMRRAAALDPKSVPSVRTRLTVARRDDAEKEEAGYDFYPDRKHLSEEFDKLWAAQARHAPDVLTEDLRDEIATIIFHQRPLKTPEVGLCLFTGQHGVPERDKRIPSAHPLNQRRILMETVNNLKVAAQGEPSRPLTREERDQIVHALDNKKHTKSLSGMTMKLKALGKVIKLRPEQGFTLETANRDAIACDPVRASLSHPDRFGARWSTLESAGQWDVVQRIRAVQSDAEHADLVGWLMDVHGLDRDHAEETANAPLPEGYGRLGLTATTRILAALEADVLNYSAAVAACGWHHSDGRTGEVLESLPYYGEILERHVIPGTGDPNDDDVKRYGRITNPTVHIGLNQLRRLVNRIITVYGRPDEIVVELARDLKLSEDQKKDVQRDIKKNTEAAIRRGKKLEEMGVPNTGANRMVLRLWEDLGDDVMTRNCPYTGKRISAGMLFDGSCDVDHILPYSRTLDDSFANRTLCLKEANRQKTDKTPWEAWGETEQWEAIAANLKNLPANKAWRFAPDAMERFEGEKDFSARALADTQYLSRIARAYLDALYDGDDGKSHVWVVPGRLTEMLRRHWGLNGVAALTDSDKQTVKAKNRTDHRHHAIDAAVVAATDRGLIKRIADMAKRDEFNGAEEVARSIPPPWEGFRDDVSAQVTRIIVSHRADHGRIDPAARKSGRDSTSGQLHNDTAYGIGRDGTVVSRKPLASLSPNDIVVTKRGANIRDVDLQKHLARVTHGLDGKAFEAALLAFAASPILPDNTDNPYFGLRRVRLEETLQESARVEVADQEGRPYKAYKGDSNHCYEIWCLPDGKIKPQVVTTYEAHQSGAEKKPHPAAKRLMRIFKRDMVMLERDGETIIGYVQKMKQNGSIFVAPHTEANADARDRDPKDDFKLIQLGAGSLVKAKARRVIVDEMGRLRDPGPPL

SEQ ID NO: 1109 - protein, 1079 aa, unidentified
  source 1..1079: note = Rhodobacteraceae bacterium HLUCCA12
MHRFAFDLGTNSIGWAVYRLAADMLPASLERTGVRIFPNGRDPQSKESNAAGRRTPRGARRRQDRSLGRRKRLLDDLIKFGLLPSDAESRKEVFAANPHEARAKAARDQVELYELGRALWHISKHRGFKSNRRAENDGDEKSKIAIASAALLKRLRSEGHPTYGDFLHARLARGEGTRIRPTGEGAKLSYAFYPTRDLLEGEFDHIWVTQAAFHPSLTEDMRRRLHDTIFFQRPLRPVRPGKCTFFPDEDRLPRWHPAAQEFLILSQLNHLRIVDDHGEQPLDITARDLVAHTLMAGTKLTWSGLKKTLKLPSLAEFNLEKGGVKELARNDVAARLLGDTKKPGPLATLWPTLDSPTREEILWQISEVADPDELICWLMERLGLSREVAERIERIPLPDGHLRFCKMATQAIVEELRLDVIPYDEAVRRAPLLGGAGLDHSDFQAEEGVDTLPPYNRLPVLQRMIGNGSGDPNDPDLLRYGRITNPTVHIALGQFRRVMNALIAEYGKPAQVVIEATRDMAKSAEELKKIENTIRDNERRNDRWRAELQDAGLLAEGARIGDRFLRMRLWEEMGRGPADRLCPYTGRPIALHQVHSDEIEIDHILPFEETFDDSPANKTLCFREANRRKGKLSPAEAAVRQPDFFDLPAIIARTKHLPANKSWRFLPGAIQKWQETRGFEDRQLNATGYFAHVARAYAEALFPKTDDEGKRRSHVWVLPGRMTAMLRHRWGLNLGDHNRKSRDDHRHHAIDAAVAGVIDRRMVQVLQTHARNMGVERLDRVLPAPPEPFDGFRDAVLSAVEKVNVSHRAQHGSIDPRDPSQTSGRLHKDFAYGEVRDVPENQTDLTIGNVVRRKPVIGLEKDDLDKVRDVKLRESLRAATEGVKDDKAKLTAALFEWSQKTGHRTLRIIKPASTARPVYGRPGKPRAGEPYKWFIPDENVWIDILQSPNGKWFGFGIDVWAANSGTGQTWQELHPDAKFIMRLHKNDTIQLFDWDDNEKCIVPGSNRIKVVNSIPNSPTNKNVKLVGLNDAGKFAGRHNDKDDPFRWDWPPYDRLRLRRARRVRIDELGRVHTIPHGTV

SEQ ID NO: 1110 - protein, 1195 aa, Actinomyces odontolyticus
MKRLNLNKGRHVSGSECSLLCSRPGLSVRGSVSFETDTNVCALCHYVCMSDYSANVQHRRYRIGIDVGLKSIGFCAIEVDERGTPIKLLNSTVHLHDGGVEPGDGKDLSRKKVSGIARRTRRRRRSNEKRLADLDSYLSQQLGWQLPNLEEFDDPHEPWHVRAELLDSYVSDPAERAEMLAIAVRHIARHRGWRNSYTSVASLTRATYPSKALIKVNERVCEALGTKIVAEATQGQLASAYVADERYALQALRGTQGLFRGRQYQSDTYHELSRILELQHIDRAQIKELTEIVFRVTHPRNGARRNMRVGHDQLPGQESKWRAEIAHPAFQKFRIVAALANLRVRSGGQERKLNANELRRVTRYVLDSALKVEDVEWFDIAEQLGIERDCLTGTAKPVFEGEPALRRPPTDAVSVIVMSSKLTKLKRWWKSANDEDRADLVKFMANSTLAEGEEFENDEVDGFLASLTDDDLAKLEELALPSGRAAYSLDSLQRLTDRMLADGCDLHEARKREFGVSSSWVPKPDPIGAPVGNPAVDRVMKEVSRWLKVAVDRWGVPEAVNIEHTRSGMMSAESAKKLTSANKARRRQIEVLAERLGGQACAGGKLNQVTKIRLLALQRQKSKCLYCGAGIRFETAEMDHIVPRSGLGSTNDRNNLVAVCRECNASKGSQLFSEWAQSGSRKDKVSFDDVIERVWSWGQDPGVSPKQHKKFQAVVVARLKSKKPDQEFDARSMESVAWMAVELGKRIRGYFASASSANEGAVVPSVGLYRGRITAAARVVSGFEGCVRFTGGNGKTRLDRRHHAMDALVIALLDDRIAQLLALRDNLRFAQLVTSGADEWRRYLHSHPSENALMYDWSQHMQVAAKKFNDSLESGMVRFTMNQRLRLGSSRAHMDSVTSFEHAYLDRNGDRVPKLDKNGMRKVKEHGEFRLLSDPLPVDLIDRAETPALWAALVKDEQFDPQTGLPADPKRTITIHGRRIGPMERIRFFGATPAGKWSASLAVRGGYVSISNTIHHVRIYKIAEEPAKYAMLRVYQVDLRHAHGKDLFSFSIPASSISMRTADKVVRKFLRDSTKKPYAWLVAGDELRVNPKFYDEGKIGEFFKEEGYGDVVEWRIVGFESATQVNLRPLRISEEGFNDETPQAVKDIAGRSKSWRVTIGALLEAGGVAVIRRNVLGEERWKSKDDRLPCSKVFE

SEQ ID NO: 1111 - protein, 1352 aa, Flavobacterium sp.
MKKILGLDLGTTSIGWAFINEGENDNETSSIINAGVRIVPLTTDEEADFKKGNTISINADRTLKRGARRGLQRFKQRRDALLQSFRGINFISSNYVYAETGKQTTFSSYKLRAKSATELVTKEELVQVLLMLNKKRGYKSSRKAKTAEEGDAIDGMKIAKEIFENNLTPGQWVYNSLSIGGKFIPDFYRSDLQKEVEKIVRFQNQFHPEQMNEKLLENIQGKARTVTSQYFSRILNIPLAENKGTREETKLQHYKWRNEALTEELDLKVLAFIITEINNQINQSNGYLGAISDRSKELYFNQETVGQFQYNQLKENAHTKLKNQVFYRQDYLDEFEKIWETQSKFYPELNDELKSEVRDITIFYQRKLKSQKHLVSFCEFEKGHKAIPKSSPLFQEFRIWQNINNIVVKNETTKEPFLLGEDLKKVIAQELSFKESMTDSQLLTFCDLKKGTHTVNFKKIEGNRTNTSLFKAFEKILVLEGYDELDLSKLDASDIKSIIKSAFSDLEISTAILDFDPTIQGNDYDKQSYYQLWHLLYSSEEDDFLKKSLMDKFGFKESHLPFLLNINLQADYGSLSAKAIKKVLPHLMDGHIYDKACTLVGYNHSSSLTTDQNNERVLKDTLELLKKNSLRNPVVEKILNQMINVINAIIKDPAMGKPDEIRVELARELKNNNEQRSEMTKAINKSTTEHEQIRKLLHTEFGIHRVTRNDIIRYKLWKECDGISLYTGKPIEPSKLFTKDYDIEHIIPKSRLFDDSFSNKTICERQLNIDKSNKTAYSFFQEKLSAEEFDQFEKRVKSLFGKISRTKQNKLLMANNEIPEGFIDRQLRETQYIAKKAKEILLEVSRNVTATIGSVTDKLRDDWELVDVMKELNWEKYDKLGLTYIEEGKNGERLYKIKDWTKRNDHRHHAMDAITVAFTKPAYIQYLNNLNARTNTDKKGNSIIGIENKYLKRDKNNKLRFIEPIPNFREVAKKQLESILISYKAKNKVVTKNKNVTKKSNGTNQKIQLTPRGQLHKETVYGKLQQYVTKEEKINANFTPEYVTKVAKKEYREALLKRLIENENDPKKAFTGKNALSKNPIYISLENNILVPEKVKIVWLKSDYTIRKDITPDLKIDKVIDIGLKTILQNRLNEFNGDTKKAFVNLDENPIWQNKEKGIAIKRVTISGVSNAQALHTKKDHLGNEILDENGQPLPVDFVSTGNNHHVAIYRDEKGNLQEEVVSFFEAVTRNNLGLSIINKNHEKGWEFLFSMKQNEFFIFPTDGFNPHEIDLLNTENYHLISRNMFRVQKIATKNYMFNHHLETKSVDGEMLKTKKQLSKISYHFIQTPSYLNYIIKIRINHLGQIVQLGEY

SEQ ID NO: 1112 - protein, 1367 aa, Eggerthellaceae bacterium
MQLRHAENYNIGLDLGTGSVGWAVTDENGELYHFKKQPTWGSRLFPSANTAAEARVHRGQRRRYDRRRQRLDLLQDFFLEPMASVDPEFFIRLRQSQLWPQDRDPQHAAYHWPLFNDEDFNECDYYKKFPTIYHLRVWLMETDEQADVRLVYLALHNIVKTRGNFLHQDNERLSAKNANMKESVDRLCSALAEWMGEVDPESSCEPKPEKLRAVLEDVSLSRGEMRDKGLPFLGLETDAAHKRIAKQVIGAVLGYKADLKKVFFLETDDPTFDLSNDAAVEEFRSSVPDEGAELFDSLLAAHSSFILQGILKGGDGRTISYCKVNEYEQYGKDLRELKDLVRQYAPTRYDEFFRGPHYEGACSKDYDPSKAKGYTLYNLGTTKLSYDDFASQVKKLFKGTGAESDERYIKMMGRFDEQTFLRRLKTSDNGSIPFQLHLEEMKAIIANQGRYYPFLKKHEKEIESLVTFRIPYYVGPLTQKNAAVAHGEPRFAWSVRNPGKENTPIRPWNWEEVIDKHASAAAFIQRMTGTCTYLQGEPVLPRASLLYEKFCVLNELNGARWSQDGDDWHRFSYDLRARIFDELFTRGTVTYKKIEHWLRSENIALNAHVKGGQGETGFESKLGSYLFFKKVLGIDDFDAQTIEMIENLVLWNTLFEDRDILKEGIQRHYGDVLSPSQIRQICKKRFTGWGRLSKKFLTGITVPTDNGAKSIMDVLEEGDPNNNHPGAAMVLMEALHDDNLGFEKAIAEANKAWMESHGKLGIDEIPGSPALRRSVNQALKIVDEIVSIAGCAPANIYIETTRDDDVDKRGKRTKKRYDAIKEALKKLGAEADADLKKDLASRSYAELDTERLALYFMQNGKSLYSGAPLDIRKLSSYQVDHIIPQSYTKDDSFENKALVLAEENQRKTDSLLLSDAIRRKMAPTWRALHDAGLMGEKKFNNLMRSHISNMQMKGFINRQIVETSQVVKFVRTMLQERYPETNVRSIKASLSHQLRVRRGLVKSRIANDFHHAHDAYLAEEMGRFIELRHSIVFDNPVALQHVIRKYIQEQAERYAKTKRLPEDASFIVQSFLTSGFSKETGEIFRDTWDADAEVARIKKFMNYRQCFISRMPIEETGTFWDATIYSPKGGRTKPTIPLKGGLDPARYGGYSSLKNAYFFVYRAEGSKGRVLRYAGVPVSVASRIKRGDLVLSEYAEQLARNEGLAFEAIVRRKILQDQLIEIDGERFYIRGNKEVRNAIEPCFSLAEAEAIEADDPTGYEAVLDEAFGTLLRFLHRYATRQEGLLRIEERARAFYSLNEEGKQQIICEILNLVNAQKNVANLKLINGPSFAGKIQLTLSKELSSNSTTALIDQSVTGMFERRQEIGL

SEQ ID NO: 1113 - protein, 1353 aa, unidentified
  source 1..1353: note = bacterium BRH_c32
MSKILGLDLGTNSIGCTLRDTSQRENQIVFSTVLTFDKGVGEEKGVEVPLVQQRTMSRSKRRNYNARRYRKWQLLETLIKASPPMCPLTMDELNRWRKYDNENGNEYPSSPEFLAWIRLDFDGDNISDFINPYELRALASKQKINNPLILGRIFYHITQRRGFKGRDEAESETILKGSDEKGIAGADATLNIMKDKNVSLSEALLIDHNENLKRIRNRYSLRKLVEEELKSICLKNEIDIESELYKNLAKSILWQRPLRTQKGNIGKCTFEINKPRCPISHPLFEEYRALAFLNNIKITNLENNEEQNLSLEEKEKIISKLFLRKSKPTFDFSEIMKLIDPNKNQYKFNFKDYVSVSGMPVTAALKELFGCNVYEISINKASSANGEKGYYDYEDLWHVLYTFTDSESLIKFAKSKLQLSDEDSVKFSKIKIPQGFAALSINAIKKILKYLHQGYIYSDAVFLANLSKVLDQSLTSEEEEKLIANVHRLMINQRSNKNKSAIINNLISNYINNEEMNGKKESSYISDDNLNKLVENEIINVLGNNRWIELGEQNQNHLINEIRDNFKNLLITRGNFSRGVLYDKVPRFDDQIKTLLKKEYPEWDEERFKYLYHPAESEFYPAAKEIDGKKILGSPEPISKGLKNPMALKTLYVLKKLINHLILTEKIDSETRVVVEIARELNDANRRAAYERWKNERQKENESLVDKITQSASEAGYPDISVDDNILTKYKLWLEQGMQCLYTGKVIAFSELLNGTSVDIEHTIPASISFDNELSNLTLANSRYNRDIKKKLIPTQLPNYNTTIEINGESYKAILPNIKFIENKVKHYSKLVEDAKKKSKSAQSKDQKDTQIQNRHYYKMHYDYWNKKLRTFTDTEIRSSWKNSQLVDTQIISKYAFHYLKTVFNIVDVQKGSVTAAFREIFNLGFKKDRNSSIHHAIDAATLTLIPYPKKRDYLLLKYFEATERKLAFHSKPEYWNNFSSEIIKELEEKTFVNYYKKDTTLVQTYKNVRKRGRIQYIRKQLANGKFEYILDDKGNKIPMVSQGDAIRGQLHKETFMGAIKLPLNNTGIRGNYKTSDKPLIFVERVPLKSLKKMEDLKKIIDDKVKGDIQKTLERKISQGKSFVQAINEDFWLLDKNGNEIKQDKNEKVLFPMRHVRCISSAGGGILTPEKALQIKQQTFLSEHEYKQYYYAQNKEMALCIFYEKNVKNKLLREFRFAGLFELAQLKIKNVNELATIPEYNLLEKRHIPSKYFIKTGYRVIVYENSPDEIRELNPDELIKRIYRVYKFNDSGANYIFLQYNSESRKDKELGEGSTKFDLSIYQPRLKLTANNFNCLVEHYDFNISIDGEIIFK

SEQ ID NO: 1114 - protein, 1260 aa, Streptobacillus felis
MKYNLGLDLGVASIGWAVTRVNESGEPLELIDANSVIFKPLDNDKGKLYNEERRNKRGARRILRRKQYRIERTKTLLLEKGLLNENELNNIYEGKIEDIYSIRIKGLTEQLSKYEIARLMIFYCKNRGFKSNRKTDELELLESLKKKVSDNDSDEKKLKPIIAKNTELIESKGLTPIEIIYMTREEDKSILGFKNKEGHYKFGFKRNQIIDEARKILENQKILNKDIIDSYIEILSSQRDFSDGPGGESKYKIDYSKLAGKCKYTGEVRAVKASPSYEIFIMLQKLNDLRYLNLDSENKREKRRLNSEEIKKIFDLVFNKDKKLTFSLIEENIEAKNIRILDVPQLSKNDYTKLRKSTFGETRKEDITEDEITNFNDKLNKERMKQELVKNNLASYKKLKNDFKKNNISGERIEELGGIDFLDLVAEILTYAKTDSKVDYYVNEVDRYSIFKNAKDVVEVMKGLPNYTKNGNLSLSLVKKLNEKMLEGLDYESSLSSLNYYINTNTDWKKFPTVSQIEDVLNTKVTNPNVKHILVILRKLYNTLLFKYGRPEKVHLELARDFSNDFSTRNSIKREQLDNRVRKEVAAFEMYGENRDIVLGKDKLSQEDFVRIKLWEEQNKVCMYSGKPIERRQLISAEVQVDHILPYSKSYDNSYSNKVLVLSKENQDKKERTPYQWLKGTSKWDEFKRRVELNINISNKKKDNLLFRDEVVKDDFLERELHATSYSSRLALNIFQRLIPVSEEDKYDENGNEKVKYIYNRNVVAFNGKMTSKLRSLYGLNRLTHNFESGNLEINNKLYYLKEFELGKESIKINAYNIETGFEISTETKVEKNKSGEYKTLKDEILQKELTKKVNLEKLSETFKDKVLFDLKIVDFENLENLDIEISQVIYKMITNLKEQVYRKNRDNHLHHALDAFLLSIMNKSMQIKLTKFNQLISSLKNREDEIFIEEKGEYVSSKEFAEELSKDRIIDLDGNEKGIKVNIEGKEFKLGITKPYDNFLNDIKFKIFDKRENPKLPYHVVKSKVNGALHAETILGESKGEITKRVSVFTLDEKKLEKIFDKDGSQKEIYETLAKWIKTKSKDYPKLKNGNIIKKVKLVDGNKDKLIKLGEKRYAEMGQTIVKILVFEKEGENGLRFASLGRYNYNQMKKGNDFEILIWKGQGEKNSHMVKFSKLNQNGYKLIQELVSNECIELELNNGAKSECLVVGFTSGKFEVASILGDDLDLMDSSIIKTILKQYQITISTIKSIKKVNRNILGD

SEQ ID NO: 1115 - protein, 1398 aa, Veillonella parvula
METQASNQLISSHLKGYPIKDYFVGLDIGTSSVGWAVTNKAYELLKFRSHKMWGSRLFDEGESAVARRGFRSMRRRLERRKLRLKLLEELFADAMAQVDPTFFMRLRESKYHYEDKTTGHSSKHILFIDKNYTDQDYYKAYPTIYHLRAELMKDGTYDIRKLFLAVHHILKYRGNFLYEGASFDSNASTLDDVLKQALENITFNCFDSSAAIGSIGQILMETGKTKSDKAKTIERLVDTYIITDEVNASGKTQKDQVKEDKKRLKAFANLVLGLNASLIDLFGSVEELEEDLKKLQITGDTYDDKRDELAKAWSDEIYIIDDCKSVYDAIILLSIKEPGLTISESKVKAFNKHKDDLAILKSLLKSDRSIYNAMFKVDEKGLHNYVHYIKQGRTEETSCNREDFYKYTKKVVEGLPDSKDKEYILSEIELQTLLPLQRIKDNGVIPYQLHLEELKVILAKCGPKFPFLNEVADGFSVAEKLIKMLEFRIPYYVGPLNTSHNVDNGGFAWAVRKASGRVTPWNFDDKIDREKSAAAFIKNLTNKCTYLLGEDVLPKSSLLYSEFMLLNELNNVRIDGKPLETKVKAHLIKAVFKQDHKKMTKNRIEQFLKDNNYIPEKHKPEITGLDGEIKNDLASYRDMVRILGNNFDLSMAEEIITDITIFGESKKMLRETLRKKFASCLDDEAIKKLSKLRYRDWGRLSKKLLNGIDGCDKAGDGTSVTIIEAMRDFSYNLMELLGDRFLFMERIQEINDKLTEGQIVNPHDIIDDLALSPAVKRAVWQALRIVDEIVHIKKALPARIFVEVTRSNKAEKKKKDSRQKRLSDLYAAIKKDDALLSGLTNEEFGGLKSELAKYDDAALRSKKLYLYYTQMGRCAYTGEVIDLSQLNTDNYDIDHIYPRSLTKDDSFDNLVLCKRTANAQKSDTYPISKEIQKAQKAFWIFLKQQGLISERKYERLTRITPLTADDLSGFIARQLVETNQSVKAATTLLRRLYPDIDVVFVKAENVTDFRHDNNFIKVRSLNHHHHAKDAYLNIVVGNVYHEKFTRNFRAFFKKNGANRTYNLAKMFNYDVKCTNAKDGKAWDVKTSMDTVNKMMTSNDVRVTKRLLEQSGALADATVYKATVAAKAKDGAYIGMKTKSSVFADVTKYGGMTKIKNAYSIIVQYIGKKGEVVKEIVPLPIYLTNRNITDQDLIDYVASITPQAKDISIIYRKLCINQLVKVNGFYYYLGGKTNSNIYIDNAVEVVVPANIAVYIKVLEKFALLHKDNNNIKASTVTTRIYNEGSTNIVSITDKDGLIVYDYLMSKLRTPLYMKMKGNKVDELSTVGRSKFMNMTLEEQSIYLLEVLNLLTNSKTTFDVKALGITASRSTIGVKIHTLDEFKIINQSITGLYSNEITIV

SEQ ID NO: 1116 - protein, 1397 aa, unidentified
  REGION 1..1397: note = NCBI_LOQG01000003:140180_12
MDKLKKQQFTDYYLGLDLGTSSVGWAVTDPNYNILKFNKKDMWGSRLFDEAQTAKDRRVQRNSRRRLKRRKWRLDLLERIFEEEIFKIDPTFFMRLKESNLHLEDKTYKKEFILFNDNNYTDKDFHNNYPTIYHLRDDLINTNEKKDIRLIYLALHSIFKRRGHFLFSGLSIDEIKNFQIVFENLKDSIKEILGFELDADRDNLNSILTNRTTTKKDKEKELKNILKNNQLLAIFKLVIGSKSNFKNIFIENETLQEKDNEINISFSDIIYDDKRDELVNILDEDIDLIDKCKNMYDYLLLKKILKQESSSISSSMIDSYNQHKVELKQLKYFIKKYCKEEYNNIFRDSNKNYSAYINLNSIDGNRKIINYSEEISKPEHLFKNLKSIFQKFGKINTEGTVVSEIIDESDKNIFKKLYEKTENHTLLARQRTTNNSILPYQIHKYELEKILENQSKYYEFLGIRKNEIIKIFEFRIPYYVGPLNNNSKHSWVVRKSGEITPQNFEDKVDLEQSAEKFILRMTNKCTYLREEDVLPKDSLIYGEYMVLNELNKVKINGSSDILIKYKQEIIDLLFKRNVTVTVKKLIEFLETKGIKVEKSEISGVEVKFNSSLKTYIKFFKIIGNKLEEDKYKNIVENIIRWKCLYGDDKKIFEKKFNSEYKNNELNKDEFNQILKLSFNGWGRLSAKLLTSQFDFVNLNTGEGPYKSVMEALRTNNLNLMELLSSNYDLMDKIEKENNENNEKGKNSTYKELVNESYVSPSVKRSIIQTIKIINEIKKITKKVPKKIFIETARTNEVKGKITEKRQEAIQKLYKSVEKDKDLIFEEIDSLNKEVKSFDNNKLRQKKLFLYFMQLGKCMYSGESIDISELNNSNTYDIEHIYPQSKVKDDSLDNIILVKKEINISEGDKYPKSSNIRNKMKSFWKILKDKKFISNEKYSRLICDKEMTVDQLSGFVARQLVTTRQATIEVIRILNILYPESEIIYSKAGNVSDFREKFDLIKCRELNDMHHAKDAYLNIVVGNVYNTKFTKNPTNFIKSQLNLDKKDSYNLKKIFDYDIERNNLIAWKKEKKDENGKVLKEGTISLVRNNILKNTVNITRMLIEDKGQLFNLTIKKKKENKDGDFIPAIKISGESQKLTSKYGYYDSLNPSYFVLLKYDDKNGNKQMIADRVFIKDLSKIKTHKDLEKYYEAKYKNPKIIKKIKKQQLILFDNYPYRISGYTNKSGLELKNAKSLFLENNYVKYLKDAIKFVLINEKNNENSYIFPKLKRDNNTRPETNEEAKARHEKEFIKLYNVFIEKLQSKEYANYCFNKRSIDLISQKEIFEKNSLLEKAKMLKCIIKIFNKDTNWQFTGKNDNLKLILTVSRSFKTFSKFNPGKLVFIDESITGLFNKKIIIK

SEQ ID NO: 1117 - protein, 1302 aa, Caviibacter abscessus
MNNLDYVLGLDLGVASVGWAVMEIDSDKNPVRLVDANSVIFKALDNDKGKLYNEERRDARGARRVLNRRKERIRRVKELLISSKFLSESELYNLYEGKLIDIFDVRKKGLTEQLNKLEIARLMIYYLKNRGFKSNRKTDDIELEEELKKLTKNNNKNQKNNGENQENSEESKKNNEKKLKPIIALNTKRLQEDNLMPIELIFKIKEEKNVTGFKNKEGLYIFGFKREQIEKEAQQILEKQKLISTELLEKYMDILKSQRDFSEGPALPSKYRIDWESKTGRCKYTGEKRVVAGAPSYEIFCMLQKLTDLRYIYIENDTKNGKYKLSSEQLNVIYNKVINEHKKLTYNLILSCIEDKNVRILNLPKLKLKDYIDITKKYLEKKQKKEEELTDEEKHELNYERNNKRNNEQLFELKHFNELIKQFKKNNISEDDIEKIGGFDFLDKIAELLTYAKTDKKLDEYYQKDRYKDIPKDVIEKIKTFKTFNQTGNLSLSLIKKLNAKMLEGNDYEKSLSSLGYSLVTDNNWEKFPTVLQIEKKFNTKITNPNVKHIMVILRKLYNTLLEKYGKPKKVHIELARDIANDFSTRNKIKQEQEKNRINREVKSLEIYSQNLDIFNHKDNISNEDYLRYRLYDEQNGICIYSGKKIEKSQLLTSEYQVDHILPYSKSGDNSYNNKVLVFAKENQDKKNKTPYQWLKNTEKWFQFKKRVELNTKIKDKKKNNLLYTDNVEKNEFLERDLHATSYSSKLALQIFKSLIPTDEKDMYDEKGEKKEIYIYNRNVIAFNGSMTSQLRKFYGLNRFTHSFESENLKLEKNYKFNELLCTENKLELTAKNEKTGDIIKKEYKVEKDKNTKDFKTEKDRIISNETLQMKNISKISEKLKNKYIENLKEKDFVGMIEFSSMELISTVFELCSQIKQEINLKNRSNHLHHALDATLLTIMNHSMQQRLTKFNQVLQQMSNSPKEYLNEETGEIMTYKELLEKMREDTETKSVDLYNNKTVQHYKIPGTNETFSLSLPYINFIEEIKNIIFIKNENSEEAKLPYHVIKSKTKGKLHSETILGESKGQVTKRVSVLKLYDKKWSKKKNIEEILKNLFDKEKSQKEIYETLKKWLSEKTKEYPKLKNGHIIKKVKMIDENKDKLIKLGNKRYVEMGQTIVKILVLRNKNKDGYRMASLGRYNHINIKNGKDFKLQIWQAADNLENIVEYSKLKNDYDKITELFPGEVIELEIKDGNKIICLVNGFTEGKLSVETILGDYTDVVRNKVFKTISSSKQYPKTISQIKNIKKLKYNILGDKICPLDKF

SEQ ID NO: 1118 - protein, 1360 aa, Oceanivirga salmonicida
MKIKQKFPNYYIGLDIGTNSVGWAVTDEKYNIFKFNGKRMWGSRLFDEAKTAAERRIFRNSRRRLKRRKYRLDLLNEIFENEISKIDKNFLQRLKESTLHLEDKSINEKYTLFNDKNFTDINFYEKYPTIYHLRKELVENTEKKDIRFIYLALHNILKKRGHFLFEGQNLTEIQEFESIFIKLSEYVYEKFGIELNLNLINEIEKILLDKKSGKLDKTREFKKIFDKNNQLISIFKLSIGSKVKLSDLYATDEYKEAEKKDISFDDSIYDEVKDIYFGILGEENITLLDICKAMYDFRILKNILHGSKYISESKVKEYETYKKDLKNLKYIMKKYYSRDDYNKLVKKSSIDELSEKTKSILEKIKNIDEEDKKIYENLLDRAKEQKILPKQKTNKNGVLPYQVHEVELEKILENQSKHYNFIKENKEKILSIFRFRIPYYVGPLNKNSDKAWFVRKSDGAIKPWNFSEKVDLEASAENFIKNLINNCTYLKNEKVIPKNSLLYEEYILLNELNKVKIDSNFLSVQDKENIINYLFKKENNVTLKKFKDFLVINNISSKDSVITGIDGKFNAKLSTYIKFKNILGNKIEEDRYVNMVEDVITWKCLYGKDLKLFMNKFNSKYSDLELSKEELNKIKNISIGTFGRLSRKLLSGLDFVNLETGEQYDSVIQALRKTNMNIMELMSKKFDLEKKIQILNSEFNKEKSYKELVDESYVSPSVKRAIIQSIRIIQEIVEITGKEPKKIFIETAREGNTGADKTKTIPRKEQILNIYESMYEANIDLQEQINDMKGKISEFDNNRLRQQKLYLYFMQLGKCMYSDEKIELSNLFDSNIYDIDHILPQSIIKDDSINNTVLVLKNINAKKTNEYPLDLDIQQKMKKYWKRLLDTNLISKIKYERLIRQNKLTDTELSGFIARQLVTTSQATNEVISILKNIYNKSDIVYAKAGNVSNFRSQYDIIKCRELNDFHHAKDAYLNIVCGNIFDTKFTKNPYIYMKKLKEKNDEFKYNMSKIYEREVKDIKNDNKIIWNDDIRENVLKIVDRNDVNVTRLSQIGSGELFDATIYKKGSPKGSGTEIQVNIPKNYSGNDENINEKYGYYKSLKNAYFLLINCEENGEKVKKIAKILIKEKNKFENSHDKFKYLEENKGIKNIKSIRKMKIGQKLIVDDFIYSIAFVSSNLIFKLNNEFSLLLDKKNTKILKNAINFLEKNKKDSDKYIVSFLKRDENKNKNEIYEEAIKRYDIEFNQLYKSICKKLASKIYINSKKPNLSIKYFNLIDIFEKIDLYNKAKFIVNIVKMLGTGSKGVVNMKEFEKIFNEYSKEKISFSAIEGIIQLSSSTLLKLDAYLLDESITGLFVKKTKI

SEQ ID NO: 1119 - protein, 1351 aa, unidentified
MKILGLDLGTNSIGWAVVNEAENERESSSIIRLGVRVNPLTVDEQNNFEKGKPITTNADRTLKRSMRRNLQRYKLRRANLVSLLKTQGWITDETLLSEQGNNSTFETYRLRAEAATKEITLEQFARVLLMLNKKRGYKSSRKMKHDEDGSFVNNLDIARELYDSGLTPGQYAYNLLKDGKKYIPDFYRSDLQEELDKIWAYQYEYHENILTHSLRSAIIDQSKTGTTKIFLKTHGIFTADIKGNRNERNKQLFELRCGALERALTAEELATVIAEVNGQINSSSGYLGAISDRSKALFINHQTVGQYLMQQLDRDPNKSLKNQPFYRQDYLDEFEQLWETQAHYHPELTAALKHEIRDIIIFYQRRLKSQKWLVANCPFEHRKVCPKSSPLFQHFRIWQVLNNVTVTVDNKTYVLNEEQKSILSKELLYKEKISKRDALKMLFVKAKGVDMNFASLEGDRTMSNLLKAAQEIVSISGHGDYDFGKMPADDIHNIIRSVFGGLGFATDWLNLDTDADDLEQESQMRLWHLIYSFEGDNSTTGDTKLVERLMSLLNLPQEYARLFANVHLEDDYCGISSKALKRILPFMKAGHIYSEACALAGYKHSEQSLTREENKNRPLKDHLEQLPKNSLRNPVVEKILNQMVNVVNSIIDTYGRPDEIRIELARELKNNALGRQAIFEAINRNTKESERIQQILKKEFGLTHVSRNDIIRYRLYQELSGNGYKTLYSNIYIPQEKLFSKEIDIEHIIPQARLFDDSFSNKTLEYRDVNIKKSNTTAIDFVRNEYGENEVEQYKKRVNDLLKSGAISQAKAKKLKMTEAEIPNDFIERDLRNTQYISRKAQEMLRDVARVVTATTGSVTDRLRQDWQLVDVMQELNWDKYERQGLTTVINGRDGQQIRRITDWTKRNDHRHHAMDALTIAFTKPAYISYLNHLNARSEDDIRSIERRFLERDANGHLRFISPIAHNFRSEAKRHLEMILVSIKAKNKVVTRNNNTTKTKGGRRNRIQLTPRGQLHDATVYGSILLPHTKTIAVDGKMTAEIIGQVQNPVFRQALSQRLEACGNDPKKAFTGKNSLEKAPVWIDQAHTEHVPAEVTIQRLEPQHTIRRAVNKDLNINKVLDKGIQHILQARLDAYGGDAAKAFANLDNNPIWLNQEKGIAIKRVTTAENISGEPLHHKHDKEGRPILDTNGKPMPSDFVRLMNNHHVAIFQDADGNLQEHIVSFYEAVARVTELGLPVIDKEYNKDKGWQFLFTLKQNEYFVFPNPAQGFNPDEIDLTDERNYSRISPNLYRVQKMSSKYYVFRHHLETTVEDKKELQGITWKRIQSLNNLKGIVKVRIDHIGRIVQIGEY

SEQ ID NO: 1120 - protein, 1086 aa, Anoxybacillus sp.
MNYKIGLDIGITSVGWAAINLDLRRIEDLGVRIFDKAEQPQGDPLALPRRLARSTRRRLRRRKHRLERIRRLLVRENVITKEEMDNLFTKRGLTDVWQLRVEALDRKLNNDELARVLLHLAKRRGFKSNRKSERNSNENSVLLKHVKENRSILDKYRTVAEMIVKDEKFQYHKRNKADDYSNMIARDDLQREIQLLFAKQREFNNPICTEHFEAAYLHIWSSQRPFASKDDIEKKVGFCTFEPNEKRAPKATYTFQSFVAWEHINKLRLVSLDGTRPLTEQERQLIYKQAFTKNKITYHDIRKLLDLPDDIKFKGLVYEVDQLLKKMENIRFLELDAYHKIRKCIEQVYSKKGVDQFSEADFDTFGYALTVFKNDEDIYAYLQNEYVRADGKKVCNLANRAYDSALIDELLNLSFSKFGHLSIKALRNILPYMEQGEVYSRACELANYDFTGPKKKEKTRLLPTIPDIANPVVMRALTQARKVVNAIIKKYGSPVSIHIELARDLSRSFDERKKVQKEQTENRKKNETAVKQLMEYGLTKNPTGLDIVKFKLWSEQQGRCMYSLEPISLEHLLDEGYTEVDHIFPYSRSLDDSYANKVLVLTKENRQKGNRTPAEYLGVGTERWNNFEAFVLTNKQFSKAKKNNLLRLHYGETEEKEFKERNLNDTRYISRFFVNFIKEHLKFADSNRNQKVYTVSGKITAHLRSRWDFNKNREESDLHHAVDAVIVACASPDIIEKITRFYQEREQNKELAKKKEPFFPQPWPHFSDELKARLSKFPQESIKVLNLGNYDNSKLESLKSVFVSRMPKRSVTGAAHQETLRRYIGEDEPSGKIQTIVKTKLSNIKLDADGHFPMYGKESDPRTYEVIRQRLLEHGNDPKKAFQQPLHKPKKNGEPGPIIRSVKIIDVKNRVVHLDEKTVAYNSNIVRTDVFEKDGKYYCVPVYTIDIMNGVLPNKAIEANKPYSEWKEMTEDYTFKFSLYPNDLVRVEFPREKVVKDSLGREVKVKDIFMYYKTIDSATGGLDLISHDQSFSLRGVGSKTLKRFEKYQVDVLGNIYQVKGEKRVGLASCHDQKTEQTVDSLQSASD

SEQ ID NO: 1121 - protein, 1379 aa, Streptococcus gallolyticus
MTKKNYSIGLDIGTNSVGWAVITDDYKVPAKKMKVLGNTDKKYIKKNLLGALLFDSGETAEATRLKRTARRRYTRRKNRLRYLQEIFADEMAKVDESFFQRLDESFLRWDDDNKKLGRYPIFGNKADVVKYHQEFPTIYHLRKHLADSSEKADLRLVYLALAHMIKFRGHFLIEGELNAENTDVQKIFSDFVRVYDRTFDDSHLSEITVDAASILTEKISKSRRLENLIKYYPTEKKNTLFGNLIALALGLQPNFKMNFKLSEDAKLQFSKDSYNEDLEELLGKIGDDYADLFTSAKNLYDAILLSGILTVDDNSTKAPLSASMIKRYAEHHEDLEKLKEFIKANKSELYHDIFKDETKNGYAGYIENGVKQDEFYKYLKNTLSKIAGSDYFLDKIEREDFLRKQRTFDNGSIPHQIHLQEMHAILRRQGDYYPFLKENQDRIEKILTFRIPYYVGPLARKDSRFSWAEYHSDEKITPWNFDKVIDKEKSAEKFITRMTLNDLYLPEEKVLPKHSHVYETYAVYNELTKIKYVNEQGKDSFFDSNMKQEIFDHVFKENRKVTKEKLLNYLNKEFPEYRIKDLIGLDKENKSFNASLGTYHDLKKILDKAFLDDKVNEEVIEDIIKTLTLFEDKDMIHERLQKYSDIFTADQLKKLERRHYTGWGRLSYKLINGIRNKENNKTILDYLIDDGSANRNFMQLINDDTLPFKQIIQKSQVVGDVDDIEAVVHDLPGSPAIKKGILQSVKIVDELVKVMGDNPDNIVIEMARENQTTNRGRSQSQQRLKKLQNSLKELGSNILNEEKPSYIEDKVENSHLQNDQLFLYYIQNGKDMYTGDELDIDHLSDYDIDHIIPQAFIKDDSIDNRVLTSSAKNRGKSDDVPSLDIVRARKAEWVRLYKSGLISKRKFDNLTKAERGGLTEADKAGFIKRQLVETRQITKHVAQILDARFNTESDENDKVIRDVKVITLKSNLVSQFRKDFEFYKVREINDYHHAHDAYLNAVVGTALLKKYPKLASEFVYGEYKKYDVHKLIAKSSDDHSEMGKATAKYFFYSNLMNFFKRVIRYSNGKVIVRPVVEYSKDTEDIAWDKKSNFRTICKVLSYPQVNIVKKVETQTGGFSKESILPKGDSDKLIPRKTKKAYWDTKKYGGFDSPTVAYSVFVVADVEKGKAKKLKTVKELVGISIMERSFFEENPVEFLENKGYHNIREDKLIKLPKYSLFEFEGGKRRLLASASELQKGNEMVIPGHLVKLLYHAQRINSFNSTKYLDYVSAHKKEFEKVLSCVEDFANLYVDVEKNLSKIRAVADSMDNFSIEEISNSFINLLTLTALGAPADFNFLGEKIPRKRYTSTKECLNATLIHQSITGLYETRIDLSKIGEE

SEQ ID NO: 1122 - protein, 1373 aa, Streptococcus equinus
MEKTYSIGLDIGTNSVGWSVITDDYKVPAKKMKVLGNTDKKYIKKNLLGALLFDSGETAEVTRLKRTARRRYTRRKNRLRYLQEIFAKEMAKVDESFFQRLEESFLTDDDKTFDSHPIFGNKAEEDAYHQEFPTIYHLRKHLADSSEKADLRLVYLALAHMIKFRGHFLIEGELNAENTDIQKLFNDFVETYDKIADESHLSEVDASSILTNKISKSRRLENLIKQYPTEKKNTLFGNLVALVLGLQPNFKTNFKLSEDAKLQFSKDTYDEDLEELLGKIGDDYADLFTAAKNLYDAILLSGILTVDDNSTKAPLSASMIKRYEEHHEDLEKLKKFIKVNNFDKYHEIFKDKSKNGYAGYIENGVKQDIFYKHLKSIISEKNGGQYFLDKIEREDFLRKQRTFDNGSIPHQIHLQEMRAILRRQGEYYPFLKENQSKIEKILTFRIPYYVGPLARKNSRFAWAKYHSDEPITPWNFDEVVDKEKSAEKFITRMTLNDLYLPEEKVLPKHSHVYETYAVYNELTKIKYVNEQGKESFFDSNMKQEIFDHVFKENRKVTKEKLLNYLNKEFPEYRIKDLIGLDKENKSFNASLGTYHDLKKILDKSFLDDKVNEEVIEDIIKTLTLFEDKDMIHERLQKYSDIFTANQLKKLERRHYTGWGRLSYKLINGIRNKENNKTILDYLIDDGSANRNFMQLINDDTLPFKQIIQKSQVVGDVDDIEAVVHDLPGSPAIKKGILQSVKIVDELVKVMGGNPDNIVIEMARENQTTNRGRSQSQQRLKKLQSSLKELGSNIINEEKPSYIEDKVENSHLQNDQLFLYYIQNGKDMYTGDELDIDHLSDYDIDHIIPQAFIKDDSIDNRVLTSSAKNRGKSDDVPSLDIVRARKAEWVRLYKSGLISKRKFDNLTKAERGGLTEADKAGFIKRQLVETRQITKHVAQILDARFNTEHDENDKVIRDVKVITLKSNLVSQFRKDFEFYKVREINDYHHAHDAYLNAVVGTALLKKYPKLAPEFVYGEYKKYDVRKLIAKSSDDHSEMGKATAKYFFYSNLMNFFKTKVKYADGSVYERPIIETNADGEVVWNKQKDFEIIRKVLSYPQVNIVKKVEEQTVGQNGGLFDNNILAKPEKDDKKKLFPIKKSLSTTSYGGYARATIAYSILIVSEFGKNKELKLLGLPLLDKVKYEKNPIAYLNSIGIINVKSIFKLPKYCLFEFQEKNTNYRRYMVSNQELKRANQLFLTCKETELVYKYIKSDNDNTHLVGNEKTILSIWNKLVIFMERTKLIDKKLFASLKQLKDEVNLINILDIASKSIDFTKISAGQKKIVLNDSLSLPIKRWQFKSDEKMLKQLNDATLIHQSITGLYETRIDLSKLGEE

SEQ ID NO: 1123 - protein, 1380 aa, Streptococcus gordonii
MKKGYSIGLDIGTNSVGFAVITDDYKVPSKKMKVLGNTDKRFIKKNLIGALLFDEGTTAEARRLKRTARRRYTRRKNRLRYLQEIFSEEMSKVDSSFFHRLDDSFLIPEDKRESKYPIFATLEEEKEYHKKFPTIYHLRKHLADSKEKADLRLIYLALAHMIKYRGHFLYEDTFDIKNNDIQKIFNEFISIYDNAFEGSSLSGQNAQVEAIFTDKISKSAKRERVLKLFPDEKSTGLFSEFLKLIVGNQADFKKHFDLEDKAPLQFSKDTYDEDLENLLGQIGDDFADLFVAAKKLYDAILLSGILTVTDPSTKAPLSASMIERYENHQNDLVVLKQFIKNNLPENYVEVFSDDSKNGYAGYVGVDSKIRKRNAKLATEEEFYKYLKNILNNVKGADYFLDKIEREDFLRKQRTFDNGSIPHQIHLQEMNAILRRQGEHYPFLKENREKIEKILTFRIPYYVGPLARGNRDFAWLTRNSDQAIRPWNFEEIVDKASSAEDFINKMTNYDLYLPEEKVLPKHSLLYEKFAVYNELTKVKFIAEGLRDYQFLDSGQKKQIVNQLFKEKRKVTEKDIIHYLHTVDGYDGIELKGIEKQFNASLSTYHDLLKIIKDKEFMDDPKNEEILENIVHTLTIFEDREMIKQRLAQYDSLFDEKVIKSLTRRHYTGWGKLSAMLINGIRDKQTGKTILDYLIDDAYYNRNFMQLINDDGLSFKEIIQKAQVVGKTDDVKQVVQELPGSPAIKKGILQSIKIVDELVKIMRHNPESIVIEMARENQTTARGKKNSQQRYKRIEDALKNLAPGLDSNILKEHPTDNVQLQNDRLFLYYLQNGKDMYTGEALDINQLSSYDIDHIIPQAFIKDDSFDNRVLTSSKDNRGKSDNVPSIEVVQKRKAFWQQLLDSKLISERKFNNLTKAERGGLDERDKVGFIKRQLVETRQITKHVAQILDARYNTEVNEKDKKNRTVKIITLKSNLVSNFRKEFRLYKVREINDYHHAHDAYLNAVVAKAILKKYPKLEPEFVYGEYQKYDLKRYISRSKDPKEVEKATEKYFFYSNLLNFFKEEVHYADGTIVKRENIEYSKDTGEIAWNKEKDFAIIKKVLSLPQVNIVKKREVQTGGFSKESILPKGNSDKLIPRKTKDILWDTTKYGGFDSPVIAYSILLIADIEKGKAKKLKTVKTLVGITIMEKAAFEDNPITFLENKGYHNVRKENILCLPKYSLFELENGRRRLLASAKELQKGNEIVLPVYLTTLLYHSKNVHKLDEPGHLEYIQKHRNEFKDLLNLVSEFSQKYVLADANLEKIKSLYADNEQADIEILANSFINLLTFTALGAPAAFKFFGKDIDRKRYTTVSEILNATLIHQSITGLYETRIDLSKLGED

SEQ ID NO: 1124 - protein, 1053 aa, Comamonadaceae bacterium
MKQLKSNSRYRLALDLGSTSLGWAMFRLGQDGSPTAIIRSGVRIFSDGRNPKDGSSLAVTRRAARAMRRRRDRLLKRKSRMLGQLVRHGFFPADEAARKALERLNPYQLRAKGLREALTPGEFARALFHINQRRGFQSNRKTDRKDNDSGALKQAIHQLRERMAASGCQTVGEWFWQVRMQQKPEGVAGQGVRARYRETPYTTDEGKKRIDKSYDLYVDRAMIAQEFDALWAAQAALQPALFTEVARADLRDTLLHQRPLRPVRPGRCTLLPDEERAPLALPSTQRFRILQEVNHLRLLDGTLSEVPLTLAQRDTVVAALEAHSKRSFDQLRKLLKLSGSVRFNLEDAKRTELKGNATSAALARKDLLGAAWAGFAAELQDEIVWQIVNEEGEGTLIAWLQQHTGVDEARAEAIANVALPEGYGSLSRKALARIVPELQRDVVTYDKAVQASGFAHHSDLGFDFDHDSDEVERVGERTIASTGEIKPVYAFKELPYYGRALQRHVAFAKDKPRNDEERYGKIANPTVHIGLNQVRVVVNALIRRYGRPAEVVVELARDLKQSREQKQEAQKKQADNQRRNARIRERVAETLGISTERVRASDIQKWILWEELSFDVADRRCPYSGVQISAAMLLSEQVEIEHILPFSQTLDDSLNNRTVAMRQANRIKRNRTPWAARADFEAQGWSYEGILQRAERMPLRKRYRFAHDGYERWLGEDKDFLARALNDTRYLSRVASEYLRLVCPGSATRVIPGQMTAMLRAKFGLNDVLGLNGEKNRNDHRHHAVDACVIGVTDQGLLQRFAQANAQAREGGLTRLVESMPLPWDTYRDHVERAVRHIWVSHKPDHGFEGGFLEDTAYSPPMSNQSGMWVTRGINGVKPNQRDAESLTMIPIARYGRGPRALVEPVDKTVFKGYVGGSNYCIEITRNAQGKWEGDVISTFKAYGIVRAGGWAQLRNPTQGQNGQPLVMRLVIGDSVRLEVEGREQTMRVVNINGNNGQMFMAPVHEANVDARNRDKQDAFAYTSKYAGSMQKAKARQVTISAMGELRDPGFQG

SEQ ID NO: 1125 - protein, 1368 aa, Streptococcus pyogenes [sequence omitted]

SEQ ID NO: 1126 - protein, 1388 aa, Streptococcus thermophilus
MTKPYSIGLDIGTNSVGWAVTTDNYKVPSKKMKVLGNTSKKYIKKNLLGVLLFDSGITAEGRRLKRTARRRYTRRRNRILYLQEIFSTEMATLDDAFFQRLDDSFLVPDDKRDSKYPIFGNLVEEKAYHDEFPTIYHLRKYLADSTKKADLRLVYLALAHMIKYRGHFLIEGEFNSKNNDIQKNFQDFLDTYNAIFESDLSLENSKQLEEIVKDKISKLEKKDRILKLFPGEKNSGIFSEFLKLIVGNQADFRKCFNLDEKASLHFSKESYDEDLETLLGYIGDDYSDVFLKAKKLYDAILLSGFLTVTDNETEAPLSSAMIKRYNEHKEDLALLKEYIRNISLKTYNEVFKDDTKNGYAGYIDGKTNQEDFYVYLKKLLAEFEGADYFLEKIDREDFLRKQRTFDNGSIPYQIHLQEMRAILDKQAKFYPFLAKNKERIEKILTFRIPYYVGPLARGNSDFAWSIRKRNEKITPWNFEDVIDKESSAEAFINRMTSFDLYLPEEKVLPKHSLLYETFNVYNELTKVRFIAESMRDYQFLDSKQKKDIVRLYFKDKRKVTDKDIIEYLHAIYGYDGIELKGIEKQFNSSLSTYHDLLNIINDKEFLDDSSNEAIIEEIIHTLTIFEDREMIKQRLSKFENIFDKSVLKKLSRRHYTGWGKLSAKLINGIRDEKSGNTILDYLIDDGISNRNFMQLIHDDALSFKKKIQKAQIIGDEDKGNIKEVVKSLPGSPAIKKGILQSIKIVDELVKVMGGRKPESIVVEMARENQYTNQGKSNSQQRLKRLEKSLKELGSKILKENIPAKLSKIDNNALQNDRLYLYYLQNGKDMYTGDDLDIDRLSNYDIDHIIPQAFLKDNSIDNKVLVSSASNRGKSDDVPSLEVVKKRKTFWYQLLKSKLISQRKFDNLTKAERGGLSPEDKAGFIQRQLVETRQITKHVARLLDEKFNNKKDENNRAVRTVKIITLKSTLVSQFRKDFELYKVREINDFHHAHDAYLNAVVASALLKKYPKLEPEFVYGDYPKYNSFRERKSATEKVYFYSNIMNIFKKSISLADGRVIERPLIEVNEETGESVWNKESDLATVRRVLSYPQVNVVKKVEEQNHGLDRGKPKGLFNANLSSKPKPNSNENLVGAKEYLDPKKYGGYAGISNSFTVLVKGTIEKGAKKKITNVLEFQGISILDRINYRKDKLNFLLEKGYKDIELIIELPKYSLFELSDGSRRMLASILSTNNKRGEIHKGNQIFLSQKFVKLLYHAKRISNTINENHRKYVENHKKEFEELFYYILEFNENYVGAKKNGKLLNSAFQSWQNHSIDELCSSFIGPTGSERKGLFELTSRGSAADFEFLGVKIPRYRDYTPSSLLKDATLIHQSVTGLYETRIDLAKLGEG

SEQ ID NO: 1127 - protein, 1121 aa, Streptococcus thermophilus
MSDLVLGLDIGIGSVGVGILNKVTGEIIHKNSRIFPAAQAENNLVRRTNRQGRRLARRKKHRRVRLNRLFEESGLITDFTKISINLNPYQLRVKGLTDELSNEELFIALKNMVKHRGISYLDDASDDGNSSVGDYAQIVKENSKQLETKTPGQIQLERYQTYGQLRGDFTVEKDGKKHRLINVFPTSAYRSEALRILQTQQEFNPQITDEFINRYLEILTGKRKYYHGPGNEKSRTDYGRYRTSGETLDNIFGILIGKCTFYPDEFRAAKASYTAQEFNLLNDLNNLTVPTETKKLSKEQKNQIINYVKNEKAMGPAKLFKYIAKLLSCDVADIKGYRIDKSGKAEIHTFEAYRKMKTLETLDIEQMDRETLDKLAYVLTLNTEREGIQEALEHEFADGSFSQKQVDELVQFRKANSSIFGKGWHNFSVKLMMELIPELYETSEEQMTILTRLGKQKTTSSSNKTKYIDEKLLTEEIYNPVVAKSVRQAIKIVNAAIKEYGDFDNIVIEMARETNEDDEKKAIQKIQKANKDEKDAAMLKAANQYNGKAELPHSVFHGHKQLATKIRLWHQQGERCLYTGKTISIHDLINNSNQFEVDHILPLSITFDDSLANKVLVYATANQEKGQRTPYQALDSMDDAWSFRELKAFVRESKTLSNKKKEYLLTEEDISKFDVRKKFIERNLVDTRYASRVVLNALQEHFRAHKIDTKVSVVRGQFTSQLRRHWGIEKTRDTYHHHAVDALIIAASSQLNLWKKQKNTLVSYSEDQLLDIETGELISDDEYKESVFKAPYQHFVDTLKSKEFEDSILFSYQVDSKFNRKISDATIYATRQAKVGKDKADETYVLGKIKDIYTQDGYDAFMKIYKKDKSKFLMYRHDPQTFEKVIEPILENYPNKQINEKGKEVPCNPFLKYKEEHGYIRKYSKKGNGPEIKSLKYYDSKLGNHIDITPKDSNNKVVLQSVSPWRADVYFNKTTGKYEILGLKYADLQFEKGTGTYKISQEKYNDIKKKEGVDSDSEFKFTLYKNDLLLVKDTETKEQQLFRFLSRTMPKQKHYVELKPYDKQKFEGGEALIKVLGNVANSGQCKKGLGKSNISIYKVRTDVLGNQHIIKNEGDKPKLDF

SEQ ID NO: 1128 - protein, 1265 aa, Mycoplasma ovipneumoniae
MHNKKNITIGFDLGIASIGWAIIDSTTSKILDWGTRTFEERKTANERRAFRSTRRNIRRKAYRNQRFINLILKYKDLFELKNISDIQRANKKDTENYEKIISFFTEIYKKCAAKHSNILEVKVKALDSKIEKLDLIWILHDYLENRGFFYDLEEENVADKYEGIEHPSILLYDFFKKNGFFKSNSSIPKDLGGYSFSNLQWVNEIKKLFEVQEINPEFSEKFLNLFTSVRDYAKGPGSEHSASEYGIFQKDEKGKVFKKYDNIWDKTIGKCSFFVEENRSPVNYPSYEIFNLLNQLINLSTDLKTTNKKIWQLSSNDRNELLDELLKVKEKAKIISISLKKNEIKKIILKDFGFEKSDIDDQDTIEGRKIIKEEPTTKLEVTKHLLATIYSHSSDSNWININNILEFLPYLDAICIILDREKSRGQDEVLKKLTEKNIFEVLKIDREKQLDFVKSIFSNTKFNFKKIGNFSLKAIREFLPKMFEQNKNSEYLKWKDEEIRRKWEEQKSKLGKTDKKTKYLNPRIFQDEIISPGTKNTFEQAVLVLNQIIKKYSKENIIDAIIIESPREKNDKKTIEEIKKRNKKGKGKTLEKLFQILNLENKGYKLSDLETKPAKLLDRLRFYHQQDGIDLYTLDKINIDQLINGSQKYEIEHIIPYSMSYDNSQANKILTEKAENLKKGKLIASEYIKRNGDEFYNKYYEKAKELFINKYKKNKKLDSYVDLDEDSAKNRFRFLTLQDYDEFQVEFLARNLNDTRYSTKLFYHALVEHFENNEFFTYIDENSSKHKVKISTIKGHVTKYFRAKPVQKNNGPNENLNNNKPEKIEKNRENNEHHAVDAAIVAIIGNKNPQIANLLTLADNKTDKKFLLHDENYKENIETGELVKIPKFEVDKLAKVEDLKKIIQEKYEEAKKHTAIKFSRKTRTILNGGLSDETLYGFKYDEKEDKYFKIIKKKLVTSKNEELKKYFENPFGKKADGKSEYTVLMAQSHLSEFNKLKEIFEKYNGFSNKTGNAFVEYMNDLALKEPTLKAEIESAKSVEKLLYYNFKPSDQFTYHDNINNKSFKRFYKNIRIIEYKSIPIKFKILSKHDGGKSFKDTLFSLYSLVYKVYENGKESYKSIPVTSQMRNFGIDEFDFLDENLYNKEKLDIYKSDFAKPIPVNCKPVFVLKKGSILKKKSLDIDDFKETKETEEGNYYFISTISKRFNRDTAYGLKPLKLSVVKPVAEPSTNPIFKEYIPIHLDELGNEYPVKIKEHTDDEKLMCTIK

SEQ ID NO: 1129 - protein, 1345 aa, Belliella baltica
MKKILGLDLGTTSIGWAFIKEPEKDVVGSEIVDMGVRIVALSSDEENDFAKGNTISINADRTLKRGARRNLQRFKLRRDALLEIFKEMKLIPSNFKYAEDGPSSTFSTLKLRDKAAKEKIELDDLVKVLLQINKKRGYRSSRKAKSEEDDGSAIDSMGIAKELYENDLTPGQWVFEALQKGRKNVPDFYRSDLQEEFKKIVNYQSEFYPDVLNSSFVEDWMGKASTPTKQYFNKKGVHLAENKGKREERRLQEYNWRAVAVNSKIDLSEIALILSQINSQISNSSGYLGAISDRSKELYFKNQTVGQYLYQQIKINPHTRLKGQVFYRQDYLDEFEKIWSVQSGFHPQLNDALKKEIRDITIFFQRRLKSQKHLISNCEFEDYHKVVPKSHPIFQEFRIWQNLNNLTLIKKDNLNEKSELALEDKIALANELAFKREQSVKDALNILGLKSSEWEFNFTKIEGNRTNHAFFEAFAKIIEIEDGEPLDLGNLKADDILDQFSEAFLRIGIDPGLLQVNNDIEGPNYEKQPYIQFWHLLYSSEDDQKLKQNLIKKFGFKPDHAKILASISLQDDHASLSSRAIKKILPHLQSGLIYDKACTYAGYNHSSSFTKEENEKRELSSELDLLKKNSLRNPVVEKILNQMINVVNAILKDPNLGKPDEIRVEMARELKANAEQRKNMTSNIASATRDHEKYREILKKEFGLKRVTKNDLLRYKLWLETDGISLYTGKPIEASKLFSKEYDIEHIIPKTRLFDDSFSNKTICERQLNIDKANVTAFSFLQNKLSGDEFEQYQSRVKSLFGKLSKAKIQKLLMANDKIPEDFIARQLQETRYISKKAKEILFEITRRVSVTTGTITDKLREDWGLVEIMKELNWEKYDKLGLTYTIEGKHGERLNKIKDWSKRNDHRHHAMDALTVALTKPAYIQYLNNLNAKELNGKKSTEIFAIEQKYLKRENGKLCFIPPVENIRTEAKKHLSKVLISYKAKNKVVTINKNRTNKKAGFNEQIALTPRGQLHKETVYGKAFHYSTKFEKIGASFDVQKINAVAKKEEREALLKRLAENGDDPKKAFTGKNSLSKMPIYLDLKRNIKLPEKVKTVVLEQNYTIRKNIDPDLKLDKVIDVGVKRILENRLKEFGGNAKLALSNLDENPIWLNKEKGITIKRVKISGVSNVESLHVKKDHFGEPILDQVGNEIPVDFVSTGNNHHVAIYEDEKGNLQEEVVSFFEAVVRQNQGLPIINKNHSLGWKFLFTLKQNEYFVFPSDDFDPTDVDLMDEENYHLISPNLFRVQKFTTKDYFFRHHLETTVEDKSELKGVSFKRLGLPGLNCIKKIRINHLGKIIQVGEY

SEQ ID NO: 1130 - protein, 1439 aa, Lactobacillus delbrueckii
MRNKEKKKGKRKMAKPKDYTIGLDIGTNSVGWVVTDDQNNILRIKGKKAIGARLFAEGKVAAERRSFRTTRRRLSRRRWRIKLLEELFDKEIAKVDPSFFARLHESWISPKDKRKRYSAIVFPSPEEDKKFHESYPTIYHLRDKLMKDDQKHDIREIYIAVHQMIKARGNFLHDESVETYRSGMSSLGGRSERTILSVQTLEELNDLFAENEGTEEAKLNVASAEQINDILTGGHLNADSQKEIGNLLLPSSFPSFDDKAKEKQVKKLIKNVATNISKAWLGYKADFSTILNLANVDKDQKKIFAFALQGGDEEDKVQELESLLEQSQTDIVDRLIEIRHAIVLSEIVPVGMTLSEAMIDKYDQHKEDLITLKAVIRNTKDKKKAAKLQAIYDLYVNNRHADLAKAMKLTGIKKRSELLDPEELKKAISSLLDDSPEAVEIKQMLEEKTFLPLQRSNNNGVIPNQLHQVELDEIIKKQSKYYPFLAEKNPDESEEAQKKAPTKLDALLTFRVPYYVGPMITKEEQEAQDGHSFAWMVRRDPQDHEAITPWNFEKKVDKMASATQFIKRMTTKDTYLLGEDVLPASSLKYQLFTVLNELNNLRVNGKKLTSDEKEQVIEGLFKKQKTVKADKFVKYWQAKHIGADIKVKGLSDPSKFNSTMSTYIDFKKIFGDQLNDVNRQNDFEKIIEYSTIFEDRKILEDKLRADFAWLSEEQIKQLCRLRLQGWGRLSDKLLTRLTDADGQNVLERLWNSNDNFVQIVSDPNIKAKIEQENQKLLRDGQSDDAVESILDDAYTSPQNKKAIRQVMRVVHDIVKACDGNVPAKFAIEFARSQEDDPKRTTARVNQMQKIYDQISDEVVSQGVKEQLSGMKSLKDRYYLYFMQGGRDAYTGAKLNIDRLSDYDIDHIMPQSFVKDDSLDNRVLVARAVNNQKSDKVPALLFGNKVVADLGITVREMWDKWQKLGMISKRKLSNLLTDPDALTEYRAQGFIRRQLVETSQVIKLTATILQSEFPDSKIIEVPAKYNSIVRKQFDLYKSREVNDYHHAIDAYLSTIVGNYLYQVYPNLRRMFVYGEFKKFSSNAEESAYDVVRRVKSMNFLDDLLRGTHGDNIYCRSTGEIVFNRNDIISKLKQAYSFKQMLVTQEVFTKKSALFDQTVYPSPERDSKKRSGLIPRKKGMDTEIYGGYSGNKDAYFVLAEAVKEKGHTLQIVGVPIRALNTLKNSANYSEKLLEIIKPQVMFNKDTGKPIKGIKDVKILMDKIPCRQPVLEGESYYMLASSKYRYSLKQISLSQMSMKYILDYIDDPNFNKHEMINIDQQDEKECLLSVYDEILEKMDKYLPLFDIRSFRKKLHDGRDAFIALPVASEEKKPGKVDVIRKVLKGLHANADITNLAELGFGTAALGALVSTGGIKISDDAVFIYQSPTGLFERRVKVSDLLK

SEQ ID NO: 1131 - protein, 1292 aa, unidentified
  REGION 1..1292: note = patric2_AUOT01000254:684847656_17
MAKILGLDLGTNSIGWAIRDTNKEGNQIVDSNVIVFPQGVGEEKGVEFSLASERTKHRASRKLYRRRKQRKTDLLNLLIDNSFCPLTTDELLLWSVYKKGQEMKYPTENHDFSEWIKINPYEVRAKAVSSSISKLELGRALYHMCQRRGFKSGRKDADAGKDLIQFQKEKDLLEKNGFKTLGEYYFDLLQRNEKVRKTKFSDDDQEVNSSRISYVEEFNFLMKTQNIEKELADQFFEVIFFQRPLKSQKGSVGKCTLEKTKSRCAVSHPLFEEFRMFQYLNSIKVKERNNDSFVFLSDYPEYYKIAQDKFYRVSAKNFKFIDVSKSINTVAKKNNLFFEFNYNDKYPVVGSPTVSKLIEVFDADDWEECKTIIQSKYKKQDNKTIDELVDELWHTLFFAGDFVNDETSDKVKSFIRDRFLISEEKVNYYEGINLKQGYSSLSKKAIVKILPFLKEKIIYPYAVFFANVDAIVGKEKWKANKQFIQDTIIDIISRYKDEILKIDIVNGLVGDFIKQYDNSNYDYILDETDKQNVTEKIKVFYGKYAWENMPETEKEALQNEIEIIFQKQLQKRRVGGYYLSKPRIDEIIKDFLIQEYKVSKEQADKLYHPSAMDAYPQSQDGFLGLPFTNSIKNPMAMRTLFYLRKLVNTLLKENKIAPDTEIIIELARELNDKNKRLAIERWQRERENENKKFREKLEELAKDTNSIVTETDVIKYRLLQEQNGKCLYTNGTISCEKLLGSNPQFDIEHTFPRSKSFDNSLVNKTLADKNFNQIKGNQIPQNLDDKYKQNFINNTLHWKETIESLEEKIEQQKYFSKVASTVEQKNRAIQQRHYLKLELDYWKQKLYRFTATEIKPNFKNSQLVDTGIITKYSELFLKSLFQRVFPAKGSMVADVRKSWGLDVKDRNFHYHHAIDAVVLSCMDKNIRDGLAEAFRESEENRYSDKFKIKKPWNTFTEDINQLKNNIIVVHNHKNTIDRQTVKKLRKRNKVQYNKLGDVIYEKGQGIRASLHKDTFYGAIERENENSEKEIWFVIRKPVTNAFSESEVNAIVDEGIKTRILKHGLKNIKTPEGWILLPSEKDANGKEIKEMLIKKIRIKTANKNLPKIKAQSHISQGKRKEHKESYYATLENIFAMAIYETVNDKGKKEQTFNTISAFDLAKHNQGNRKLEMPVEENIFKNKGKKNEVLIPLSKVLKVNQMAIFYENNPEELKSISKENLSKRLFKITQFESDGRIQFRHHAQGGADKDLKKESSLDFEKSAQKLRISLSNIKAIYEGKDFILHPSGKIDFLI

SEQ ID NO: 1132 - protein, 1379 aa, Prevotella aurantiaca
MRKILGLDLGTTSIGWALVNEADNDNESSSIIRLGVRVNPLTVDEKSNFEKGKAITTNSDRQQRHGARINLQRYKLRRQNLRNLLQDQGWLSNEALYEEGKGTTFETYKLRAKAAEEKISLHEFARVLFMLNKKRGYKSNRKANNKEEGQLFDGMTIAKKLYEEHLTPAEYSFQLLSKGKKFAQDYYRSDLIAELERIWNEQKKYYPEILTDEFKQQLEGKTKVNTNKIFLAKYGIYSADLKGLDRKLQPLKWRIEALKQQVSKEILAFVISDLKGHIANTSGYLGAISDRSKELFFNKQTVGQYLWASLKNPHISIKSKPFYRQDYLDEFEKLWETQAAFHKQLTPELKHEIRDIIIFYQRPLKSKKGLISVCELEQRKVKVTIDGKEKEITIGPKVAPKSSPVFQEFRIWQNINNILLINNDTNEKHSLDEKERNLLYQELSVKVKLSKTDVLKILNKKGKQWDLNYKEVEGNRTQAILFDCYNKIISLTGREECDFKKLQASEIRHHVTTIFKNLGFNTDILDFNPSLVKHELEKQPMYMLWHLLYSYESDNSRTGNEALLRKLEIDFGFPKEYATVLCDVVFEDDYSNLSVKAMRKILPYLEVGNDYSQACAYAGYKHSRRSLTKEELDQKIYKERLELLPKNSLRNPVVEKILNQMINVINTIIDEYGKPDEIRIEMARELKSSAAEREKATRAISQANAENQRIREILERDFALSYISRNDIIKYKLYQELEANGFKTLYSDTYISKEKLFSKDFDVEHIIPKARLFDDSFSNKTLEARDINLAKSNKTAFDFVQEKYGTEGAEAYKKKLDILLSKEVISRAKYNKLLMKEADIPSEFIERDLRNTQYIAKKACEILGELVKTVTPTTGEVTNRLREDWQLVDVMKELNFEKYQKLGLADIVEDRDGRKIKRIKDWTKRNDHRHHAMDALTIAFTKPAFIQYLNNLNARSNKSNSIYAIENKELHREDNKLKFNAPIPIHEFRAEAKRHLSAILISIKAKNKVMTQNVNKIKTKQGVIKKIQLTPRGALHNETIYGTKKRPIITMVKVGAALDEATINKISNLTIREALLKRLAEYNGDAKKAFAGKNSLEKNPIYLNEEKTKVLPALVKTVEWETYHPIRKPITPDLKIEKVIDKGIRKILKARLAKFNGDAKKAFSNLDENPIYIDEAKKIALKRVSIEGVLSAIPLHTLKDQAGKLIIGKDGKPVLGNYVQTSNNHHIAFYYDEDGNLQDNAVSFFEAAERKSQGIPIVDKNYNHDKGWSFLFTMKQNEYFVFPNEATGFIPTEVNLMDEANYDMISPNLYRVQTISKIIYDKSIIRDYLFRHHLETTVERIPNLKGITYKQLKSLPHLKGIVKVRINAIGKIVAIGEYD

SEQ ID NO: 1133 - protein, 1068 aa, Necropsobacter massiliensis
MTLRYILGLDLGIASVGWAVVEIDENGYPIRLIDLGVRAFEKAETAKEGKSLNEERRLARASRRLIRRRVQRLKQAKRLLKENGVLLPSDFISSQLQLPINTWQLRVKGLSEKLERQEWAVVLLHLIKHRGYLSQRKNEAQTENKELGAMLGGIAENQKLLQSAEFRTPAEIAVKKFVVEAKHIRNQRGSYAHTFNRLDILAEMQLLFQKQRELGNPFTSANFEKNMTACLMFQKPALSGEAILKMLGHCTFETDQYKAAKNSYSAERFVWLTKLNNLRILHEGEEFALTEEQRRSIIDEPYKKAKLTYAQVRNLLKLPETAIFKGVRYRQDKVAESATLMELKAWHAVRKALESNNLKTEWEELKTKPELLDEIGTAFSLYKTDDDIRAKLGDKLPEAVLECLLAQLNFDKFINLSLQSLAKILPLMEQGVRYDEACQQVYGDHYGSKTKQNEIFLPKILADEIRNPVVLRTLTQARKVINAVVRRYGSPDRVHIEIARELGKSFQDRQKFIKQQEENRKARERAGENFREIFPHFVGEPKYKDLLKLRLYKEQDGKCLYSGKALDLTRLLENGYVEVDHALPFSRTWDDSQNNKVLVLKAENQNKGNRTPFEWLGGVENSDRWKMFKVNVEMSAFSYAKKQRLLTQKLDEKGFKDRNLNDTRYISRFMMNWIADNMLLKGKGKRQVFAPNGQITALLRGRWGLTKNREESDRHHALDAVVVACATVSMQQKITRFMQYEAEHPYRQNLGRVDVETGEIIPLHFPAPWEYFREEVMIRVFSDVPKEDLTIQLPARLEANHEFVQPLFVSRMPTRKMTGQGHKETVRSAKRLEEKISIKRVALTELKLDLLENMANCEREVELYQALKERLNAFKNDPVKAFAEPFYKKGGQLVKAVRVEFLQKAGVLVHQGAGVTDNATMVRVDVFKKNGKFFLVPIYTWQVAKGILPNKAIYGSDEDNWLEIDESYQFLFPMYPNDLIKIVKQEGKLQNEYFGYYKELDRSDARIIISSHDRDIRKGNVKQKGSDKLTGKFRISTKSKVISFEKYEIDELGKNIHLCRYSKRPNVR

SEQ ID NO: 1134 - protein, 1022 aa, Helicobacter pametensis
MKIKTLGVDIGIASIGWAVVEGEYIDGNLKNEQIIDSGVRIFTKAENPKTKESLALPRRNARSARRRNARRRARVQQVKSYLCQTLGLDSKDFIQEGNLAPIFQTSKDFLSPWELRERALYRVLDREEFARVILHIAKRRGYDDITYGIEGKDDDGKIKKAIKENNALLIESKSQTIGEMMFKQYYSQSLNVRNKKENYNRCVGRSELRDELEKIFATQQKLGNPYITQDFIHKLLGNPNAESKQVKEGLIFYQRPLKGFQDKIGRCQHIKGESQAYRACKNAPSAEEFVAITKIINFLANLKNLYGDVSLSPKEGIQKIMLEAQKNKKGLTYSKLKALLDLPSDFEFAGLDYSGEKSPEGAVFLSLPSTFELSKIIAEREMQDKIADILGANKDWEIILKEFKKLDLSQDQIQAIKDAKLSFSKHINLSLEALYHILPLMREGKRYDEAVQILQEQGIFSKPQNKNLQLLPPLSELVKEDSYFDIPNPVLKRALSEFRKVINALLEKYGGFHYFNIELARDVSNGKKRRNELERINKENQKENDEATTLLRTLGIPNTSKNRLKCKLWRQQGEQCLYSGVNITADHLRDEKLLQIDHALPLSRSLDDSQSNKVLCLTSSNQNKLDQTPYEWLGGDEKKWNAYVGRVYASKFSSSKKRKLTLKNFKTKTTDDFLARNLVDTGYIGRVVKEYVKTSLSFLPLPDGKKEYIRIISGSMTSAMRSYWGIQDKNRDHHLHHAQDAIIIACIQPNMIQKYTKYLQDKETHKLKSSEKAQLLKEGDYKTKLTLRWSMSNFGEKMQESIQKIIVSHSVSYKVTGALHEETVRKKEFYYKSFGGEEGVKKALEFGKIRAVNHGIVDNGAMVRVDIFKSKDKGSFYAVPIYTYDFAIGKLPNRAIVQGKSNGVLKDWIEMDENYEFCFSLFKNDCIRIQTKEMQEPALVIYKSTDASNATIKIEHLSKYSCTQDEKILFKLKDNKLPMQGKQGIWGLKLFQKVKLSPLGEVIECKPRNRQPISLKSTPKNV

SEQ ID NO: 1135 - protein, 1156 aa, Ruminococcus albus
MGNYYLGLDVGIGSIGWAVINIEKKRIEDFNVRIFKSGEIQEKNRNSRASQQCRRSRGLRRLYRRKSHRKLRLKNYLSIIGLTTSEKIDYYYETADNNVIQLRNKGLSEKLTPEEIAACLIHICNNRGYKDFYEVNVEDIEDPDERNEYKEEHDSIVLISNLMNEGGYCTPAEMICNCREFDEPNSVYRKFHNSAASKNHYLITRHMLVKEVDLILENQSKYYGILDDKTIAKIKDIIFAQRDFEIGPGKNERFRRFTGYLDSIGKCQFFKDQERGSRFTVIADIYAFVNVLSQYTYTNNRGESVFDTSFANDLINSALKNGSMDKRELKAIAKSYHIDISDKNSDTSLTKCFKYIKVVKPLFEKYGYDWDKLIENYTDTDNNVLNRIGIVLSQAQTPKRRREKLKALNIGLDDGLINELTKLKLSGTANVSYKYMQGSIEAFCEGDLYGKYQAKFNKEIPDIDENAKPQKLPPFKNEDDCEFFKNPVVFRSINETRKLINAIIDKYGYPAAVNIETADELNKTFEDRAIDTKRNNDNQKENDRIVKEIIECIKCDEVHARHLIEKYKLWEAQEGKCLYSGETITKEDMLRDKDKLFEVDHIVPYSLILDNTINNKALVYAEENQKKGQRTPLMYMNEAQAADYRVRVNTMFKSKKCSKKKYQYLMLPDLNDQELLGGWRSRNLNDTRYICKYLVNYLRKNLRFDRSYESSDEDDLKIRDHYRVFPVKSRFTSMFRRWWLNEKTWGRYDKAELKKLTYLDHAADAIIIANCRPEYVVLAGEKLKLNKMYHQAGKRITPEYEQSKKACIDNLYKLFRMDRRTAEKLLSGHGRLTPIIPNLSEEVDKRLWDKNIYEQFWKDDKDKKSCEELYRENVASLYKGDPKFASSLSMPVISLKPDHKYRGTITGEEAIRVKEIDGKLIKLKRKSISEITAESINSIYTDDKILIDSLKTIFEQADYKDVGDYLKKTNQHFFTTSSGKRVNKVTVIEKVPSRWLRKEIDDNNFSLLNDSSYYCIELYKDSKGDNNLQGIAMSDIVHDRKTKKLYLKPDFNYPDDYYTHVMYIFPGDYLRIKSTSKKSGEQLKFEGYFISVKNVNENSFRFISDNKPCAKDKRVSITKKDIVIKLAVDLMGKVQGENNGKGISCGEPLSLLKEKN

SEQ ID NO: 1136 - protein, 543 aa, Prevotella histicola
ALYEEGKTSTFETYMLRAKAAEEEISLHELCRVLFMLNKKRGYKSNRKANNKEDGKLFDGMTVAKKLYEEHLTPAEYSLKLLSSGKKFKQEYYRSDLKEEFDRIWNEQQKYYPEILTDDFKQQLQGKSKGNTSKIFLGKYGIYSADLKGLDRKLQPLKWRVEALKQKVDKEVLAFVISDLNGQIASTSGLLGAISDRSKELYFNKQTVGQYLWTSLKESPHVSIKNKPFYRQDYLDEFEKIWETQATYHKELTPELKQEIRDIIIFYQRPLKSKKGLISVCELEQRKVKVTIDGKEKEISIGPKVAPKSSPMFQEFRIWQNLNNILLIDKGNNSNRPLYEEERNLLYEELSVKEKLSKAEALKVLNKNGKQWDLNYKEIEGNRTQAVLYDCYNRIIGMTGHEECNFKKLKASDIRYNVKTIFKNLGFSTDILDFDSSLQGHELERQPSYQLWHLLYSYESDNSRTGNDALLRKLETAFSIPKEYAAVLSDVVFEDSYGNLSVKAMRNILPHLQAGLDYSQACEKAGYKHSRRSLTKNELDKKE

SEQ ID NO: 1137 - protein, 557 aa, Chryseobacterium gallinarum
VLAETGKNTTFQTQYLRAKAAREKIELDELARVLLLINKKRGYKSSRKVQNDDDGKAIDGLSVAKELYEKNYTPGQYAYDLLKRGKKQIPDFYRSDLQNELDRIWEFQKQYHPDILTDEFKKELEGKGQRATAAIFLNRYKIYTADNKGTREEKKIQAYQWRVEALSQPLDVKEVAYVIAEINNNLNNSSGYLGAISDRSKKLYFNGQTIGEYLFEELSANPHTRLKNQVFYRQDYQDEFEKIWKIQTKFHPELTKELKEQVRDIVIFYQRKLKSQKGLISFCEFESREIEIEENGKRKRKKVGLKVAPKSSPLFQEFKIWQVLNNIEIKNEDERRYLEPEEKELLFNELNCKGNLTSQKCLELLGFKSKDAKLNFKVVEGNRTNEKLYDAFLKILELQGYNVFELLKIKEDKDEAKLSELKASADEIKGMIKEIFNANLINTSILDFNAELEGKDFENQASYQFWHLMYSYEGDNSPSGNEKLYELLEKKFGFKKEHSKILSTIVFSQEYGSLSTKAMRRIYPYIKDNKYSEACLLAGYNHSKHSLTKEELENRKL

SEQ ID NO: 1138 - protein, 575 aa, Parabacteroides sp.
TILSEQGNRTTFETCRLRAKAAEEEISLEELSRVLLMINKKRGYKSSRKVKKEEDGVLIDGMEIAKKLYEEDLTPGQLCSQLLESGKKVLPDFYRSDLQEELDRIWSVQKQFHPDVFCDAAKEEIKGKNRSQTWAILANYFVWKEEVVGWNDREAKNETIEKECKLVGLKRTTKGYELKKENYRWRAQALTEQLGLEEIAVVLQEINGQINASSGYLGAISDRSKVLYFNHQTVGQYQMAELDKNPHASLRNMVFYRQDYLDEFDRIWEKQAEFHKELTAELKKEIRDMIIFYQRRLKSQKGLISFCEFERLEIVVEKDGKKQTKVIGCKVIPRSHPLFQEFKVWQTLNDIKVLGREKKRNALSASESRALYPEEKEILARELAIKENMKKADVLKLLFENPQELDLNFKQIDGNRTGFSLFSAYSKMIEKYGYEPLDFKKPADEIIGQLRTIFTDLGWNTNLFTIDLTKEGKELEMQPYFRLWHLLYSFEGDNTSTGNGKLIEKIMQLCGVEKEYAVELASLSFQDDYGSLSAKAIKRILPYLKEGNLYDVACEYAGYRHSKSSLTKEEIENKV

SEQ ID NO: 1139 - protein, 578 aa, Capnocytophaga canis
TILTENGKGTTFQTLELRAKSAKEKISLGELARVFLTINKKRGYKSSRKAKNEDEGQLIDGMEIAKRLYEENLTTGQLSLQLLKEGKKSLPDYYRSDLQFELDKVWNFQKQFHSDILTDEFYAQLKGKGQRATSALFLAKYQIYTAENKGSREDKKLQAYQWRVDALSKELTREELAFVITEINNNLNNSSGYLGAISDRSKELYFNNETVGEYLWKQIAANPHTSLKNQVFYRQDYLDEFERIWNTQAQFYPQILTESLKKELRDVVIFYQRKLKSQKSLVSFCEFENKEIEIKKEDGTSTKKVIGLKVAPKSSPLFQEFKIWQNLNNVLIRKKGSKTKKVAKTQQAVLFEEEKTISELDLEAKQALFNELNLKGNLKADYCLEILGYSPKEWEMNYPELEGSRTNKALYEAYLKITDLEGYDAKNYLKVKLNKDEVELDDLKVPASEIKDMVQAIFKEAGINTDILHFNAELDGKDFENQASYQLWHLLYSYEGDDSKSGNELLYKLLETKFGFKKEYAQILANVSLSDDYGSLSTKAMRKIHPYIKENKFSTACELAGYRHSKHSLTKEENDNRV

SEQ ID NO: 1140 - protein, 601 aa, Ornithobacterium rhinotracheale
HYSKKIDFKKHLGQFFGNSQPKISYVENDHGKHEFIFMDSYREMLKEFSKHNIKNVPYDWTIYYLRKKALSQKISKEELAWVILNFNKKRGYYQFRDDNADENKENKIEKYYALKVTNVKKEDAQNYTITLENGWIYKNKSKISLLDWVGSTKEFISTEKFDNKGNIIKKKNGEDDRTLKLVDSEKDWIAIKKSTEDRIENYGKTVGTYLYEHLLKDPNQKLNGELINIIDRKFYKNELKQILEKQKEFHPELLNEDLFQKSIIELYPKNSTRQKELKNKDLCYLLIDDVIYYQRDLKKKNSTINKCSFESREYYLNGEKQIQKINCIAKSKPLYQEFRTLQFIKNLKVYEIIDGLEKDITSKLLPDFETKEHFFEWLNDKEKIDQLQLLSYKCFDLHDNVKNDLIAKGIKRPTEKAIRTELLEKYRWNYSKDNDRNFLLNETRFKILKYLKKVDKKLTLTNEQIESLWLLLYSAKDERELKNGLQKFSEKNKLPKKFSDIFISFPPFKKEYGAYSEKALKKLLSLVRFGKYWSFNKIDNNIQNKIMNILNGEVDDSISDRVREKTILLQDKNDFQDLPLWLASYVAYNRFSEVSEIKYWD

SEQ ID NO: 1141 - protein, 611 aa, Weeksella virosa
HYAAEIDFEKRFGQFLAETEPKLAWKKNAEGKFEFLFQRSFDEMVADFKANGQDIKIPYDWTIYYLRKKALTQKISPQELAWIILNFNQKRGYYQLRGEEEEENPNKKVEFYSLKIVDVVADEQPNKKGDTWYSLHLENGWVYRRSSKIPLYDWKDKVRDFIVTTDINEDGSEKLDKDGEVKRSFRAPKEDDWTLIKKKTEQEIEQFNQTVGSYIYEALLDNPTQKIRGKLVRTIERKFYKSELKKILEKQIELQPELFTEDLYNACARELYRRNVAHQQQLSSRDFVYLFLNDIIFYQRPLRSQKSLISNCSLEFRTIKDKDGNGQIIYLKAIPKSNPYYQEFRVWQWLYNLKIFTKEDDKDVTNQFINKVEDLEALFEFLMNQKEVNHTDILTYLIEPIVKSKYPNAKGKAFKDELKKELKKYRWNYVYDADKDESKSYPMNETRYELRKRLDKVENVPADFMTRKIEQHLWHIIYSVTDKIEFEKALKSFANKYDLHQESFVENFKRFKPFDSDYGTYSEKAIKKLLPLMRVGKYWSWDIIDDKTKTRIGKIITGEYDETIKNRVREKAIDLTEENHFQGLQLWLAQYIVYDRHSEADIAGKWNSVAD

SEQ ID NO: 1142 - protein, 519 aa, Flavobacterium frigidarium
HYVYAENGSNSTFLSYQLRAKAAIEKVSKEELVQVLLMLNKKRGYKSSRKAKSADEGDAIDGMKIAKEIFENNLTPGQWVYNSLLKEGKFIPDFYRSDLQKELERIVRFQNQFHSEQMNEKLLEDIQGKTRTQTSQYFTNAIKIPLTENKGSRDEVKLQHYKWRSEALTSELDLKILAYVITEINNQINQSSGYLGAISDRSKELYFNQETVGQYQYKQLQENAHNKLKNQVFYRQDYLDEFEKIWKTQARFHPELTDKLKTEVCDITIFYQRKLKSQKHLVSFCEFEKGHKAIPKSSPLFQDFRIWQNLNNIVIKNETTKEPFVLDEDLKKIISEELLFKESMTDVQMMAFCDLKKGNHSANFKKIEGNRTNTEIFKAFEKILILEGYDELDFSKLDASDIKQIFKSAFVDLGISTAILHFDPKIQGNDFDKQGYYQFWHLLYAAEDDDKLKETLKNKYGFKENHLPYLLNINLQADYGSLSAKAIKKILPHLMDGHIYNKACLMSGYNHSSSLTTEQ

SEQ ID NO: 1143 - protein, 437 aa, Rikenellaceae sp.
DLCPALSEEQLNAWQGKGIYPLDDAFIRWQRTDDNADRNPYRDRFRCLTEELDLACREERYVLGRALYHLCQRRGFLSNRKDAGNEAEEGKVKQEIKTLSADMAAAGCEYLGEYFYRLYQRKEKIRKHYTARNEHYLAEFRAICRKQRLDEELRQALEKAIFYQRPLKSQKGLVGKCTFEKDKSRCPVSHPRFEEFRMLQFINNVRVTGPGDAEPRPLSPEEVEIVRPLFLRKSKPHFDFEDIAKKIAGKGNYACRGELLQAPYRFNCAGKSTVTGSPVSALFASVFGDDWQREICSLYTLGAGKNEEQILNDVWHVLFAFEDEERLQAWLQEKLQLSADDAKTLAAFRLPQGYASLSLNVINKILPYLRRGYRYDEAVFFANLGKVLPAEVYADPARRREVEQGISAQMDDLGDGEKTRKEERIRDYLRRYWGVEE

SEQ ID NO: 1144 - protein, 640 aa, Jejuia pallidilutea
DEQELQIWSKYKKGSTRRFPENEKFLKWLACDFTYEEGENYKNPYVLRVKALNHIVTKHEFGRALYHIVQRRGYKDIGETDKETENQIKRRNDDGFKKALDIHGTVAKALNEEFLKKGKRARNQYPLREEYKHELEELCKAQGYNIQKEGKEGYKNKFVKSLWKAIIWQQPLKTQRGNIGKCSLEPTKPRSPISHPIFEIFRSWQFINTIRYYDDDGEKQVLSQKIKQALFYEKFLKKDSNFKFEEIRKFLDKRFQKAKRYNYPIDRKTGKYDTSVSGMPVCKGLINVFGEKAQSALDDMELYQINNAPKIIDKYSIYDLWHIIFEFDAEHLDKFATEKLKIQNKIVTRKKKQISISPLVELKEKFIQGYADLSLKALCKIIPFLKKGHLYNDAVILAKIPELLDTQWQEKRDLINEVLEKSNKLYNERKAIINIANNLIDKHKGLNHSEKFAYKDFEYALVPDDIEEIEKACVGYFGEKSWIKNKKKEEIIKEVGFEYQDYFHDTKRAYRKFPNFTEIFKDDLKENGINLKGELYHHSNRKNIYDNTLEINHETGEKYLPTYKDTGIEILPVPYIDSIKNPMFNKSMSILRKLINELIVAGEVDDNTEIIVELARELNDNNKRAAIERYQNLRKNNREK

SEQ ID NO: 1145 - protein, 510 aa, Caenispirillum salinarum
PVLERSPEDLKDLTRTPPKADPRAIFFLRADAARRPLDGPELFRVLHHMAAHRGIRLAELQEVDPPPESDADDAAPAATEDEDGTRRAAADERAFRRLMAEHMHRHGTQPTCGEIMAGRLRETPAGAQPVTRARDGLRVGGGVAVPTRALIEQEFDAIRAIQAPRHPDLPWDSLRRLVLDQAPIAVPPATPCLFLEELRRRGETFQGRTITREAIDRGLTVDPLIQALRIRETVGNLRLHERITEPDGRQRYVPRAMPELGLSHGELTAPERDTLVRALMHDPDGLAAKDGRIPYTRLRKLIGYDNSPVCFAQERDTSGGGITVNPTDPLMARWIDGWVDLPLKARSLYVRDVVARGADSAALARLLAEGAHGVPPVAAAAVPAATAAILESDIMQPGRYSVCPWAAEAILDAWANAPTEGFYDVTRGLFGFAPGEIVLEDLRRARGALLAHLPRTMAAARTPNRAAQQRGPLPAYESVIPSQLITSLRRAHKGRAADWSAADPEERNPF

SEQ ID NO: 1146 - protein, 452 aa, Salinispora pacifica
KDELESYAKYRKGKKQEFPSSSEFNSWLKLNPYELRDRALHEDISRFEFGRILYHIIHHRGFKTGRKSNEDGALYKGNEDTVGVDETKNLLQQYATLGEYLNSLRIKSDGNERLRGRYTLRNWYVDEFNKIWERQAGKLGLENETVHSRNKRYYGPAGSSEHRRKLQAYKKAGISFEIEGDFICREQTVSLKDYLGNPDKGILFYQKPLKSQKHLLSKCRYEKRKSVCQISHPEFEYYRAMQFANQIEYGAGEKLNETDRKDVIILLLSKDKAVKMSDLKKKIQKTGVQFNYADDHKVPGSPTTAFISKVTDTSNVENIDWELFHSIWNDLVFYDKSEKLKEKFQRSYNIDVSIEQLNKYKINTDYSSLSLKAVRNINPFLQMGMLYNDAVIFAGIRRVIGEKSFDANADEIISHVSKLKEKNNRDVNQSFTDALREYVMQTFNISMNQTYK

SEQ ID NO: 1147 - protein, 380 aa, Sulfitobacter donghicola
GLMPSDPKQAKQLEALDPYELRARGLDETLELTELGRALFHLNQRRGFKSNRKTDAGDNESGKIIDATARLDWAMRDHRARTYGEFLHMRRQKADTPRTTPAVRTRLTIAARDGAEKEESGYDFYPDRQHLRDEFDALWEAQAEYHGVLTEDLRDEIGTIIFHQRPLKTPKVGKCLFTNEERVASAHPLNQRRILVETVNALRVAQLGEVARALTLEERDTILHALDNKAHTKSLSGMSIKLKALGKVIKLRSGQYFTLETANRDAIACDPVRASLSKPDRIGSYWSTLDHNAQWEVVNRIRAVQSDADHRELVAWLVSQHRLAAEHAEGAAYAPLPDGYSRLGITATKRILAALEANVIPYSKAVESCGWHHSDERTGE

SEQ ID NO: 1148 - protein, 362 aa, Mucispirillum schaedleri
FLLPSNEIERKALAVLNPYELRSRAVNERLELFELGRLLMHLSKRRGFKSNRKVDKEDSSGKIKPAIERLKNKMQETNKKTAGEYLYSLMQNGKPVRARLGRIDGSNGYEIYLDRALIEEEYNLIMNEQKKHHKELTDDIINEIFNIIFYQRPLKKQIIGKCSLTGEDTKLKKAHVLAQDFILLQKVQDLRVFDDNQLEFRPLSNDEKDIIKRELRKKKEVSYENIRKLLKKYYENVKYGMFSHETLYKKLQGNKTNALMSDKEIIGDSWYSLSPEVQYDIIEELYSDKDNDELSKLYSEKFNLNESQINGLLNKAIYRLDSGYIRYGKTAVTNLNSIMDKDNLNLHDAREEAGYEKENKQD

SEQ ID NO: 1149 - protein, 414 aa, Mesorhizobium sp.
GLMPASEKERKALADLDPYQLRAAGLDKALAPHELGRAIFHLHQRRGFKSNRKTDRKSDDRDKGKIATASAALAKKFEDENARTFGEFLWRRHRDPDMKRQAVLKAHDPAKGKPDLRAAKLRQPTRIRLEGQGATALYEFYPTREMLCHEFDALWEAQARHHPMLLTREAGDKIRSILFRQRELKPPLIGLCTFEYAAGEKESRLPKALPSVQAREIYERLGHIRLSTGSGTDRPLKSSERDDLATALLHCGLTKIKVSKTKGLAFKTEFRKALRLGGEVRINFEEMGEEGLVDLRTNRLLVQDDHYGPRWRALSWSGKDAFVKKLLEATDDDKLVARLMTEDGLSAVQARNAASIPLPDGYSRLGPTANAAILQALIDSRDENGFVVTYDKAVRRAGERLGKDWHHSDERDGE

SEQ ID NO: 1150 - protein, 369 aa, Neisseria meningitidis
GVLQAADFDENGLIKSLPNTPWQLRAAALDRKLTPLEWSAVLLHLIKHRGYLSQRKNEGETADKELGALLKGVANNAHALQTGDFRTPAELALNKFEKESGHIRNQRGDYSHTFSRKDLQAELILLFEKQKEFGNPHVSGGLKEGIETLLMTQRPALSGDAVQKMLGHCTFEPAEPKAAKNTYTAERFIWLTKLNNLRILEQGSERPLTDTERATLMDEPYRKSKLTYAQARKLLGLEDTAFFKGLRYGKDNAEASTLMEMKAYHAISRALEKEGLKDKKSPLNLSSELQDEIGTAFSLFKTDEDITGRLKDRVQPEILEALLKHISFDKFVQISLKALRRIVPLMEQGKRYDEACAEIYGDHYGKKNT

SEQ ID NO: 1151 - protein, 379 aa, Geobacillus sp.
GVLTKEELDKLFEEKHEIDVWQLRVEALDRKLNNDELVRVLLHLAKRRGFKSNRQSERSNKENSTMLKHIEENRAILSGYRTVGEMIVKDPKFALHKRNKGENYTNTIARDDLEREIRLIFSKQREFGNMSCTEEFENEYIAIWASQRPVASKDDIEKKVGFCTFEPKEKRAPKATYTFQSFIAWEHINKLRLISPSGTRGLTDEERRLLYEQAFQKNKITYHDIRTLLHLPDDTYFKGIVYDWGESLKQNENIRFLELDAYHQIRKAIDKVYGKGKSSSFLPIDFDTFGYALTLFKDDADIRSYLRNEYEQNGKRIANLANKVYDNELIEELLNLSFTKFGHLSLKALRNILPYMEQGEVYSSACEKAGYTFTGPKKK

SEQ ID NO: 1152 - protein, 374 aa, Bacillus okhensis
DILNEAELQVLYQEKELLDIWTIRVEALDRRLSRTEWARLLIQLAQRRGYRSARKSEENDKETGVVLQNIRENKKLIDGYRTVGEMWVKDPRFQGRRHNSRSEYVFNVTREMLEEEIRTLFHTQRELGLSFASKEMEESYLSIWGKQLPFASGKDILKRVGFCTLEEQERRFPKATFTFQYFMVLDKLNRLRIKPSMRPLTEEERKSTLHYLFDRDDLSKKKTPPKVMYKEIRKQLNLAATETFNELTYDPNESMTKNENVLFVNLDAYYRIKQQCDLHNERYGPRDYDALGYALTVYKTDKDIRQYLRNKTNLANRIYSEELISNLLSQSYATFGHISKKALLAILPSMEKGDTFKVAADKMGYDTTGLQLVK

SEQ ID NO: 1153 - protein, 365 aa, Tistrella mobilis
GLLPSADEDALKRPRLDPWELRARGLDQCLSAEEFAVALGHIARHRGFRSSAKRKAANTSGEDSKMLSALLVTRERTARYRTVGEMFARDPEYSARRRNRDGIFDRTVARDDLIHEVGKLFEAQRARGSAFASPDLEADFNAIAFRQAEMQDSERLVGNCPFERDEKRAARWAPSFERFRLLTRLINLRIATAEGERRFTPEDLARVSAELGATAKLPVSRVRALIGLLPDERFTTIRVEDEDRDIVARTGEAAPGTWRLRKTLGEALWAEMQARPDQLDAIAHVLSFFEATAKIRSELDRLGLPAAVIEALDRGLEDGAFAKFKGAGHISAKACRNLLPHLQQGHRYDQACRLAGYDHAASTLS

SEQ ID NO: 1154 - protein, 371 aa, Kingella kingae
NVLQANDYDEKGLIIGLPNQAWELRAQGLDRKLEPKEWAAVLIHLVKHRGYLSQRKNESQTADKELGALLSGMNHNHQLLQSQSNQYRTPAELAIKQFATQDGHIRNQRGAYTHTFNRLDLQNELNQLFDAQTRLGNPHVSGSLKTAINDLLMNQKAALSGDAILEMLGRCTFEPSEYKAAKNTYSAERFVWLGKLTNLRIQDNGLESALSREQRELLLNEPYNKTKLTYQQVRKLLRLPETAFFKGLRYGKDNAESATFMEMKSYHAIRKSLENKSLKSEWEKLKTQPKLLDLIGTAFSIYKTDDEIAGCLKNQLPENVIIALQGQLNFSNFMELSLKALEKLLPLMEQGLRYDEACTQIYGNRHEKIAD

SEQ ID NO: 1155 - protein, 374 aa, Clostridium perfringens
NILTKEELEGLFKNKEVIDVWEARVKGLDYKLSREEWAKILINFCKRRGFKSNRKNEAKDKEAGQILSSISYNIEKMKETNSRTIGEYIYNEVKNSEDSYAPLRNKFGEYKMCVSRDVIREEIHTLFEKQRELGNNFASDEIEDKYFEIFNSQRPFSNFEDLEKLVGFCTFERKKHKRAPKHCISSEEFTLYEGINKLSIIKDGEKRKLSEEERTLVVNEAFNKKEIKYTTLRKLLGLSEEELFSTLTYSIDKDISKTENTKFVSLKGYHEIKRAIEKGVSKKAWQDIENNRNLLNDIAYVLTLGKTDDEIEKQLRLRNVPEELFESLLDMSFNKFNNLSIYALEKILPFMKEGYQYNEACEKAGYNFKAIYEG

SEQ ID NO: 1156 - protein, 375 aa, Neisseria sp.
GILSAADFNSDGLPNLPIDAWQLRVAGLERKLTNQEWAAVLLHLVKHRGYLSQRKSETQTENKELGRLLAGVAENSKLLSESSEQYRTPAELAVKLFAEQSGRLRNKGGDYTHTFNRLDLQKELHLLFERQCALGNPFASAELQSKVDELLMTQRSALQGEAVLKMLGKCTFEPSEYKAAKNTYSAERFIWLTKLNNLRILYNGEDRALDEGERKQLLDEPYKKAKLTYKQVRSILNLPESAVFKGLRYGKDSDGLKAENGALMEMKAYHKIRTVLEKAGLKGEWENRIRNPEILDQIGTAFSVYKTDEDIKAELAALRLPENVLDALLAGLNFDKFIQLSLKALSNILPLMERGIRYDEACKEVYGDHRALAES

SEQ ID NO: 1157 - protein, 365 aa, Campylobacter coli
LKLNYQDYIANNGELPKAYEGRLISPYELRYKALNEKIEPKDLARVILHIAKHRGYMNKNEKKSSDNEKGKILSALKTNALKLEKYQSVGEYFYKEFFQKYRENTKDFINIRNKEGSYENCVLASDLEKELKLILEKQKEWGYSYNDNFIKEILKVAFFQRPLKDFSYLVGACTFFEDEKRACKNSYSAWEFVALTKIINELKSLEKESGELVSSQIINEILNHVLDKGSITYKKFREYIKLHESMKFKSLKYDKDNVESTKLIEFRKLVEFKKALGEHSLSREELDQIATYITLIKDNEKLKITLEKYSLNNEQIKNLLEIDFNDHINLSFKALNLILPLMKEGKRYDEACKLLNLKTKSNNQK

SEQ ID NO: 1158 - protein, 371 aa, Sulfurospirillum sp.
YKLIDKTLLDEEMGMFHSQSNRVDVWKLRHDALYHLLSGDELARVLIHIAKHRGYKFLGDDESDEESGKVKKAGAELKKKFLEAGCQSVGEWLWKERGLQGKKRNKSGDYEISIPRDFLVEEIQRIFETQQKFGSTFATSELQKAYTDIAFYVKPMQSIEDMVGYCTFYPKIKSKNQDGEKRAPKASPSAEQFVILSKIFSTIVIDENKQEKKLIELKSIEQLIQIARSKETLKYKQLRKELNLAKDISFKSISDEEKTWINLVGNAKFKKILGLNYETFLKNTEISDEIAKILTYDKTFEQKETKLKNLLVNIDWIDNNHIAELAKLSFSQFNQLSLKAIKIISKIMIEGYARYDEAVQYAFENNLLPKP

SEQ ID NO: 1159 - protein, 397 aa, Dechloromonas denitrificans
GLIADTKLFKPELPFSKSLWQLRVDGLDRRLNDEEWARVIYHLCKHRGFHWISRAEAKQAEGDSKSEGGKVKQGLAGTAKLMDEKGYRSAAEMVLAEFPQAQRNKQGEYQKALSRELLAKELALLFAQQREYGNLHTPGALETAILGNGDKKSGLFWQQKPALAGTDLLKMLGTCTFEKGEYRAPKASFTAERHVWLTRLNNLRIVTDGVTRQLTEQERQLCLPLPYRQAGDLTYKQLGSALAKAGLLEAGGFKFTGLAYPTEAQKAEGKAKDPESATLVKIPAWHELRQTLTKGGLNDEWEKLAGDALCGQPEIFDKIAWVLSVYKDDDEVRAELAKLALPNPQALTEALLNIRFDKFHSLSLKALRAIVPHMEQGLRYDEACVQAGYHHSQLLKV

SEQ ID NO: 1160 - protein, 402 aa, Nitratifractor salsuginis
GILDYSETMKINDPKNNPIKNRWQLRAVDAWKRPLSPQELFAIFAHMAKHRGYKSIATEDLIYELELELGLNDPEKESEKKADERRQVYNALRHLEELRKKYGGETIAQTIHRAVEAGDLRSYRNHDDYEKMIRREDIEEEIEKVLLRQAELGALGLPEEQVSELIDELKACITDQEMPTIDESLFGKCTFYKDELAAPAYSYLYDLYRLYKKLADLNIDGYEVTQEDREKVIEWVEKKIAQGKNLKKITHKDLRKILGLAPEQKIFGVEDERIVKGKKEPRTFVPFFFLADIAKFKELFASIQKHPDALQIFRELAEILQRSKTPQEALDRLRALMAGKGIDTDDRELLELFKNKRSGTRELSHRYILEALPLFLEGYDEKEVQRILGFDDREDYSRYPKS

SEQ ID NO: 1161 - protein, 386 aa, Enterococcus cecorum
GFIPSPNKNPYEIRVRGLEHQLSRDEIAIAVLHIAKRRGISYSLDDVVDENVTDFKGKIAKNQEALKNKTPGEIQYERLLKYGKVRGTVTNYVEYDEQPEYFLNVFPNSAYVDEAKRILTCQKQYYPEITDDLIENIVKIISRKRAYYIGPGNEKSRTDYGIYRTNGETLENIFEILIGKDSVNPDELRAPANSLTAQVYNLLNDLTNIRYNGSERLTPEQKQDILSELLTTEKTVQMLNVIAKKVNVKKEEISGFRTKKDDKPDFHTLEVYRKVRKHMLNKGIDINEWPTECFDELAFIFNLNTEIGEIRNRISEKVVPKYDFITNQIVDDLLEDPKIFAISTSQKWHRFSIKTMNVLIPELLNGYNEQMTILTRMGLLEDSKND

SEQ ID NO: 1162 - protein, 395 aa, Facklamia hominis
GFKQDSKLKHVCPYELRVKGLHEKLTQGEIYKVVLHILKKRGISYLDESDENSSGIDGASYKDQVNLNLNLQKELTPGQIQLKRLKENGRIKSGVTFENGYQLNVFSVSAYANELNKILTKQSEYYSEIDQIWIDRFTKNGYRKEAGLVYRKRPYYDGPGNEKNNSIYGRWANFKEDGHPKENIFDQLIGLDSVDSTQVRASASTLTAQKYNLLNDLNNLTIIEDDRKFTTDEKVSIINYLMTQDITRFGPKELAKFYQLEVDQIRGWRIDNKGNPEIHSLKVYRDWKKIFNTSSIDLTSIQTWVVDELANVITLNTEIPSTLATLKIKIPDIDQQILNFVENNFYELKKKTSKNSWHSFSLKTLNILIPELLNTSEEQNTILERLNLKFDLKNK

SEQ ID NO: 1163 - protein, 389 aa, Streptococcus sinensis
GLITDFSKVSINLNPYELRIKGLNEKLTNEELFIALKNIVKRRGISYLDDANEDGESSSSEYGKAVEENRKLLADKTPGQIQLERFEKYGQVRGDFTIEENGEKHRLLNVFSTSAYKKEAERILTKQQDYNQDITDEFIQAYLTILTGKRKYYHGPGNEKSRTDYGRFRTDGTTLDNIFGILIGKCTFYPEEYRAAKASYTAQEFNLLNDLNNLTVPTETKKLSEEQKRQIIEYAKGAKTLGAATLLKYIAKLVDGSVEDIKGYRIDKSEKPEMHTFDIYRKMQTLETVDVEKLSREVLDELAHILTLNTEREGIEEAIKVSFIKREFEQDQIAELVSFRKSNSSLFGKGWHNFSIKLMTELIPELYETSEEQMTILTRLGKQKTKARS

SEQ ID NO: 1164 - protein, 361 aa, Eubacterium dolichum
GIISTSFHPLNNPYDVRVKGLNERLNGEELATALLHLCKHRGSSVETIEDDEAKAKEAGETKKVLSMNDQLLKSGKYVCEIQKERLRTNGHIRGHENNFKTRAYVDEAFQILSHQDLSNELKSAIITIISRKRMYYDGPGGPLSPTPYGRYTYFGQKEPIDLIEKMRGKCSLFPNEPRAPKLAYSAELFNLLNDLNNLSIEGEKLTSEQKAMILKIVHEKGKITPKQLAKEVGVSLEQIRGFRIDTKGSPLLSELTGYKMIREVLEKSNDEHLEDHVFYDEIAEILTKTKDIEGRKKQISELSSDLNEESVHQLAGLTKFTAYHSLSFKALRLINEEMLKTELNQMQSITLFGLKQNNELS

SEQ ID NO: 1165 - protein, 387 aa, Streptococcus macedonicus
GIVTDFRNLNLNPYELRVKGLTEQLTNEELFAALRTISKRRGISYLDDAEDDSTGSTDYAKSIDENRRLLKTKTPGQIQLERLEKYGQLRGNFTVYDENGEAHRLINVFSTSDYEKEARKILETQADYNKKITAEFIDDYVEILTQKRKYYHGPGNEKSRTDYGRFRTDGTTLENIFGILIGKCSFYPDEYRASKASYTAQEYNFLNDLNNLKVPTETGKLSTEQKEALVEFAKSTATLGPAKLLKEIAKILDCKVDEIKGYREDDKGKPDLHTFEPYRKLKFNLDSVNIDYLSREVLDKLAGILTLNTEREGIEDAIKRNLPNQFTEEQISEIINVRKSQSTAFNKGWHSFSAKLMNELIPELYATSDEQMTILTRLEKFKVKKKS

SEQ ID NO: 1166 - protein, 377 aa, Turicibacter sp.
GFEKGEVLAPTPYHLRVKGLTEKLSKPEVYAALYNLMKHRGISYLEDVELDEADSSSVSQNVELLKEYYPCEIQLERYEEYGQIRGIIETYNKDGEKESLVNIFPTGAYKKEAEAIILKQGQFYPELDKVFLEKFTEILTVKRPYYVGPGNKKSRTDYGIYRENGETLENLFDILIGKCTIYPQEARAAKFSYTAQLFDFLNDMNNISIAGEKLTEVQKREIYHQIMSSKTVNMMKIITKVTGCLKEEVTGYRVDSKYKAEFHSFASYRQFRNKMLDYGFDVQTLNVEMFDKLAAKLTLNTEYHQIITQLESLNLGLSKELIEKIADFRKKNRSLFSKWHSLSLKAMNEVVDELWSTSKNQMQIFSELGGFKSNIEV

SEQ ID NO: 1167 - protein, 376 aa, Bacillus niameyensis
GLPSESIGKMDPYQARYNAIFGEVSKEELVAGLYHLVKRRGTTLDSPEDEKSSGNELSTKEQLSRNRKFLENRYICEVQLERLSNGHEKIRNHENRFRTEDYVKEARAILIRQQQRYSEITDEFIEDFINILKSKREYFDGPGSEKSPTPYGQYYLDKDGKLAYTSMINKMRGICTYFPDHLRIAKMSYTADLYNLLSGDLNKLLINGEYLTYEDKLYLIDHFIKKGKNITLTQILKYKGISDDSDVSGYRIDLKTDKPIFTEFTGFKELKKIVDKNDLPSSILEDIDLIDDIIEILTAEKSYYRREEQLKPLFSEYDQETIDRIVNAFKESTSFKGYHALSKKAIELILEDLWYTNKNQMELFAERKLEEKRLSD

SEQ ID NO: 1168 - protein, 364 aa, Massilibacterium senegalense
RIMAEDAQPISNKPYEIRVKGLSKELTDEELAIALIHIAKRRGIHNVETTLDEQKDDNELSTKEQISKNEKLLRNKFVCELQLQRLTRNKENEIPYKVRGYQNRFKTSDYIKEVQQILNTQRQYNKKITDEFIERYIELIKKRREYFEGPGEGSEYGWGGDPRKWYEQLMGKCSYFPEELRAVKASYSAQLFNALNDLNNIVIMREENTKLSAEEKRRLIEKVFKIRKKPTLKQIAKEVGVNFEDIKGYRVNAKGEPIFTSFDFYHSIKTITQRHEIIENDKILDQMARILTVMQTPSEKRERLKQEIPELTTSEISEISELRFTSTHSLSLKLIYLLLPELWSTTKNHMQILSEMKLKPKRIS

SEQ ID NO: 1169 - protein, 642 aa, Kurthia huakuii
TDFFGATDSLHFWKNDNQFEQRTLSQVLKELRINPKKIPTIYHLRKLLMEGPKQDIRLIYLAIHNLIKYRGHFLNTGRWTKQNQGFNFLVECSDIVTAYSEINGLALPSLDFQAIQSIIEDTDMVRKDKQKQLEKVSSKSFVPLWQLLLGLSVNAEKLFVESQNTILYKEAKLKLVLGSEELDEVRENLTEVENHFIDEAFALYQQIMLQDLLQGHECVAASKVASYEKYQEDLCEFKRLINETKDEALYRRLFITPKKAMAEYKEQPNKDNKEKLCLLDRYNRSSKDKEAVLNTMAKLLATSNVNHHADLIENIKEGTFLAHQKGTHNAAIPNQNSIYEIEQILTNQQSYYSFITDEFINKVIEIASFRIPYYIGPLAKNNQSKFAWLERINNEGHITPATFDSLVNESITAEQFIKRMINKCTYLQEEDVLPKQSLLYQYFEVLNELNSIQIRPANAASHTKYRLPIEAKKCVIEFGFRQYKVMTHKRLIQVLKEQQFEYLIGEDYEVFGTQQEGRFASSLKSYVEFKSLFKNSAVPFDEVMIEQLIEWLTIFNEKTIIKKKIKEQYPKFPDVMIERVLKKNFVGWGNLSKKLLDELILNDGKTVIEKMCDSTLNFREMLTVKNSNLEELIKKNNRSKRQ

SEQ ID NO: 1170 - protein, 622 aa, Streptococcus equinus
ESFFQRLEESFLTDDDKTFDSHPIFGNKAEEDAYHQEFPTIYHLRKHLADSPEQADLRLVYLALAHMIKFRGHFLIEGQLDAENTDVQKLFNDFVEVYDRTLDDSHLSEITVDASSILTEKFSKSRRLENLIKHYPTEKKNTLFGNLVALALGLQPNFKTSFKLSEDAKLQFSKDTYEEDLEELLGKIGDEYADLFTSAKNLYDAILLSGILTVADNTTKAPLSASMIKRYNEHQVDLKKLKEFIKNNASDKYDEIFNDKDKNGYAGYIENGVKQDEFYKYLKTTLSKIDGSDYFLDKIEREDFLRKQRTFDNGSIPHQIHLQEMRAILRRQGEYYPFLKENQAKIEKILTFRIPYYVGPLARKNSRFAWAKYHSDEPITPWNFDEVVDKEKSAEKFITRMTLNDLYLPEEKVLPKHSHVYETFAVYNELTKIKYVNEQGKSFFFDANMKQEIFDHVFKENRKVTKAKLLSYLNNEFEEFRINDLIGLDKDSKSFNASLGTYHDLKKILDKSFLDDKTNEQIIEDIVLTLTLFEDRDMIHERLQKYSDIFTSQQLKKLERRHYTGWGRLSYKLINGIRNKENNKTILDFLIDDGHANRNFMQLINDDSLSFKTIIQEAQVIG

SEQ ID NO: 1171 - protein, 621 aa, Streptococcus equi
DGFFQRLEDSFYVLEDKEGNKHPIFANLADEVAYHKKYPTIYHLRKELVDNPQKADLRLIYLAVAHIIKFRGHFLIEGTLSSKNNNLQKSFDHLVDTYNLLFEEQRLLTEGINAKELLSAALSKSKRLENLISLIPGQKKTGIFGNIIALSLGLTPNFKANFGLSKDVKLQLAKDTYADDLDSLLAQIGDQYADLFLAAKNLSDAILLSDILTESDEITRAPLSASMVKRYREHHKDLVTLKTLIKDQLPEKYQEIFLDKTKNGYAGYIEGQVSQEEFYKYLKPILARLDGSEPLLLKIDREDFLRKQRTFDNGSIPHQIHLEELHAILRRQEVFYPFLKDNRKKIESLLTFRIPYYVGPLARGHSRFAWVKRKFDGAIRPWNFEEIVDEEASAQIFIEKMTKNDLYLPNEKVLPKHSLLYETFTVYNELTKVKYATEGMTRPQFLSADQKQAIVDLLFKTNRKVTVKQLKENYFKKIECWDSVEITGVEDSFNASLGTYHDLLKIIQDKDFLDNPDNQKIIEDIILTLTLFEDKKMISKRLDQYAHLFDKVVLNKLERHHYTGWGRLSGKLINGIRDKQSGKTILDFLKADGFANRNFMQLIHDSELSFIDEIAKAQVIG

SEQ ID NO: 1172 - protein, 634 aa, Enterococcus faecium
EHFFARLNESFLVLDEKKQSRHPVFATIKQEKSYHQTYPTIYHLRQALADSSEKADIRLVYLAMAHLLKYRGHFLIEGELNTENSSVTETFRQFLSTYNQQFSEADDKQTEKLDEAVDCSFVFTEKMSKTKKAETLLKYFPHEKSNGYLSQFIKLMVGNQGNFKNVFGLEEEAKLQFSKETYEEDLEELLEKIGDDYIDLFVQAKNVYDAVLLSEILSDSTKNTRAKLSAGMIRRYDAHKEDLVLLKRFVKENLPKKYRAFFGDNSVNGYAGYIEGHATQEDFYKFVKKELTGIRGSEVFLTKIEQENFLRKQRTFDNGVIPHQIHLTELRAIIANQKKHYPFLKEEQEKLESLLTFKIPYYVGPLAKKQENSPFAWLIRKSEEKIKPWNLPEIVDMEGSAVRFIERMINTDMYIPHNKVLPKNSLLYQKFSIYNELTKVRYQDERGQMNYFSSIEKKEIFHELFEKNRKVTKKDLQEFLYLKYDIKHAELSGIEKAFNASYTTYHDFLTMSENKREMKQWLEDPELASMFEEIIKTLTVFEDREMIKTRLSHHEATLGKHIIKKLTKKHYTGWGRLSKELIQGIRDKQSNKTILDYLINDDDFPHHRNRNFMQLINDDSLSFKKEIKKAQMIT

SEQ ID NO: 1173 - protein, 626 aa, Enterococcus italicus
NNFFYRLNESFLVADDAKYDKHPIFGTLDEEIHFHEQFPTIYHLRKYLADGDEKADLRLVYLAIAHIIKFRGNFLIEGELNTENNSVIELSKVFVQLYNQTLSELEGFQFIDESIDFSEVLTQQLSKSERADNVLKLFPDEKGTGIFAQFIKLIVGNQGNFKKVFQLEEDQKLQLSTDDYEENIENLLAIIGDEYGDIFVAAQNLYQAILLAGILTSTEKTRAKLSASMIQRYEEHAKDLKLLKRFVKEHIPDKYAEIFNDATKNGYAGYIDGKTKEEEFYKYLKTTLVQKSGYQYFIEKIEQENFLRKQRIYDNGVIPHQVHAEELRAILRKQEKYYSFLKENHEKIEQIFKVRIPYYVGPLAKHNEQSRFAWNIRKSDEPIRPWNMNDVVDENASAVAFIERMTIKDIYLNENVLPRHSLIYEKFTVFNELTKVLYADDRGVFQRFSAEEKEDIFEKLFKSERKVTKKKLENYLRIELSISSPSVKGIEEQFNANFGTYLDLKKFDELHPYLDDEKYQDTLEEVIKVLTVFEDRSMIQNQLEQLPLNLSTKTIKALSRRKYTGWGRLSARLIDGIHDKNSGKTILDYLIEDESDSYIVNRNFMQLINDDHLSFKKIIEDSQPYK

SEQ ID NO: 1174 - protein, 637 aa, Streptococcus agalactiae
DSFFHRLEDSFLVEEDKRGSKYPIFATLQEEKDYHEKFSTIYHLRKELADKKEKADLRLIYIALAHIIKFRGHFLIEDDSFDVRNTDISKQYQDFLEIFNTTFENNDLLSQNVDVEAILTDKISKSAKKDRILAQYPNQKSTGIFAEFLKLIVGNQADFKKYFNLEDKTPLQFAKDSYDEDLENLLGQIGDEFADLFSAAKKLYDSVLLSGILTVIDLSTKAPLSASMIQRYDEHREDLKQLKQFVKASLPEKYQEIFADSSKDGYAGYIEGKTNQEAFYKYLSKLLTKQEDSENFLEKIKNEDFLRKQRTFDNGSIPHQVHLTELKAIIRRQSEYYPFLKENQDRIEKILTFRIPYYIGPLAREKSDFAWMTRKTDDSIRPWNFEDLVDKEKSAEAFIHRMTNNDFYLPEEKVLPKHSLIYEKFTVYNELTKVRYKNEQGETYFFDSNIKQEIFDGVFKEHRKVSKKKLLDFLAKEYEEFRIVDVIGLDKENKAFNASLGTYHDLEKILDKDFLDNPDNESILEDIVQTLTLFEDREMIKKRLENYKDLFTESQLKKLYRRHYTGWGRLSAKLINGIRDKESQKTILDYLIDDGRSNRNFMQLINDDGRSNRNFMQLINDDGLSFKSIISKAQAGS

SEQ ID NO: 1175 - protein, 626 aa, Streptococcus ratti
ESFFHRLEDSFLVSEDKRGDHHPIFGNVVDEVKYHEQFPTIYHLRKYLADTPEKADLRLVYLALAHMIKFRGHFLIDDPKLDVKNTDSQELFSQFLTAYDVTQEDSHLADVKINISDIITEKMNKSRKVEALLFHFPSQKKNSFFGNLVSLVFGLLPNFKTNFNLAEDAKLQLSKDSYDEDLENLLGQIGDEYTDVFVAARKLYDSILLSGILTVNDLSTKAILSASMVRRYEEHNKDLAKLKAFVKANFTHDVFKEVFSDASKNGYAGYIEGKTSQEDFYKYVKNLIGKVDGSADFIEKIDREDFLRKQRTFDNGSIPHQVHLAEMKAILRRQGEYYPFLKEHAEKIQQILTFRIPYYVGPLDRHGHSDFAWASFNSEEKVTPWNFEEIIDKNKSAQAFIERMTNQDLYLPNEKVLPKHSPLYEKYTVYNELTKIKYVTETGTAKFFDANLKQEIFDGLFKKERKVTKRKLLTFLEKNFDEFRIVDIQGLDKETETFNASYGIYQDLLKIIKDKAFMDDSENADILEDIVLTLTLFEDREMIKQRLAKYADLFDKKVIDNLARRRYTGWGRLSAKLLNGIRDKRSRKTIMDYLVDDGRSNRNLMQLITDDNLTFKDEIAKAQYSD

SEQ ID NO: 1176 - protein, 625 aa, Listeria monocytogenes
ANFFCRLSDSFYVDNEKRNSRHPFFATIEEEVEYHKNYPTIYHLREELVNSSEKADLRLVYLALAHIIKYRGNFLIEGALDTQNTSVDGIYKQFIQTYNQVFASGIEDGSLKKLEDNKDVAKILVEKVTRKEKLERILKLYPGEKSAGMFAQFISLIVGSKGNFQKPFDLIEKSDIECAKDSYEEDLESLLALIGDEYAELFVAAKNAYSAVVLSSIITVAEAETNAKLSASMIERFDTHEEDLGELKAFIKLHLPKHYEEIFSNTEKHGYAGYIDGKTKQADFYKYMKTTLENIEGADYFIAKIEKENFLRKQRTFDNGAIPHQLHLEELEAILHQQAKYYPFLKENYDKIKSLVTFRIPYFVGPLANGQSEFAWLTRKADGEIRPWNIEEKVDFGKSAVDFIEKMTNKDTYLPKENVLPKHSLCYQKYLVYNELTKVRYINDQGKTSYFSGQEKEQIFNDLFKQKRKVKKKDLELFLRNMSHVESPTIEGLEDSFNSSYSTYHDLLKVGIKQEILDNPVNTEMLENIVKILTVFEDKRMIKEQLQQFSDVLDGVVLKKLERRHYTGWGRLSAKLLMGIRDKQSHLTILDYLMNDDGLNRNLMQLINDSNLSFKSIIEKEQVTT

SEQ ID NO: 1177 - protein, 644 aa, Lactobacillus sp.
PDFFLRQKYSEISPKDKDRFKYEKRLFNDRTDAEFYEDYPSMYHLRLHLMTHTHKADPREIFLAIHHILKSRGHFLTPGAAKDFNTDKVDLEDIFPALTEAYAQVYPDLELTFDLAKADDFKAKLLDEQATPSDTQKALVKLLLSSDGEKEIVKKRKQVLTEFAKAITGLKTKFNLALGTEVDEADASNWQFSMGQLDDKWSNIETSMTDQGTEIFEQIQELYRARLLNGIVPAGMSLSQAKVADYGQHKEDLELFKTYLKKLNDHELAKTIRGLYDRYINGDDAKPFLREDFVKALTKEVTAHPNEVSEQLLNRMGQANFMLKQRTKANGAIPVQLQQRELDQIIANQSKYYDWLAKPNPVEKHRASKPYQLDELLTFRIPYYVGPLITPKQQAESGENVFAWMVRKNPSGNITPYNFDEKVDREASANTFIQRMKTTDTYLIDEDVLPKQSLLYQKYEVLNELNNVRINNEALSTDQKQRLIHEVFERHSSVTIKQVVDNLVAHGDFAQRPEIRGLADEKRFLSSLSTYHQLKEILHGAIDDSTKLHDIENIITWSTVFEDAAIFKTKLAEIDWLDPATIKKLSNIRYRGWGQFSRKLLDGLKLGNGHTVIQELMLSNHNLMQILADETLKETMTELNQDKL

SEQ ID NO: 1178 - protein, 646 aa, Pediococcus acidilactici
PTFLARLKESNRSNLDPKKSFQGSLLFPERKDYQFYEEYPTIYHLRKALMEEDRKFDIREIYLAVHHIIKYRGNFLNGTPMRSFKVENIELDTLFDQLNQLYAEIVPDNELAFDLAQVADVKDVLSSTTIYKMDKKKQLVKMMLLPASNKALQSENKKIVTQFVNAILNYKFKLDVLLQVETDADWSLKLNDEGADDKLEEFTGDLDENRLEIIDLLQRLHNWFSLNEITKDGNSLSAAMVEKYENHHHHLGLLKKVIENHPDAKKAKALKETYTAYVGKTDDKTQNQDDFYKAVEKNLDDSPDAKEIKRLIQLDQFMPKQRTGQNGAIPHQLHQQELDQIIEKQSKYYPFLAEPNPNVKRRKDAPYKLDELIAFKIPYYVGPLVTPEEQAQNKENVFAWMKRKAAGPITPWNFDEKVDRMESANRFIRRMTTKDTYLFGEDVLPAESMIYQKFVVLNELNNLKINGRHLSLKDKQDVYNDLFKQQKTVSIKALQNYYVTKKKAATAPTVGGLADPKKFLSSLSTYIDFKNMFGERVNDPQFQEDLEQIVEWSTIFEDRGIFKAKLQALGWLSEKQIQQLVAKRYKGWGRLSKKLLTGLKNAEGYSILDEMWRSTENFMQIQTRPEFAALIQQANEKQFEGNDPNN

SEQ ID NO: 1179 - protein, 643 aa, Acidaminococcus sp.
PRFFIRLHESALWRDDVAETDKHIFFNDPTYTDKEYYSDYPTIHHLIVDLMESSEKHDPRLVYLAVAWLVAHRGHFLNEVDKDNIGDVLSFDAFYPEFLAFLSDNGVSPWVCESKALQATLLSRNSVNDKYKALKSLIFGSQKPEDNFDANISEDGLIQLLAGKKVKVNKLFPQESNDASFTLNDKEDAIEEILGTLTPDECEWIAHIRRLFDWAIMKHALKDGRTISESKVKLYEQHHHDLTQLKYFVKTYLAKEYDDIFRNVDSETTKNYVAYSYHVKEVKGTLPKNKATQEEFCKYVLGKVKNIECSEADKVDFDEMIQRLTDNSFMPKQVSGENRVIPYQLYYYELKTILNKAASYLPFLTQCGKDAISNQDKLLSIMTFRIPYFVGPLRKDNSEHAWLERKAGKIYPWNFNDKVDLDKSEEAFIRRMTNTCTYYPGEDVLPLDSLIYEKFMILNEINNIRIDGYPISVDVKQQVFGLFEKKRRVTVKDIQNLLLSLGALDKHGKLTGIDTTIHSNYNTYHHFKSLMERGVLTRDDVERIVERMTYSDDTKRVRLWLNNNYGTLTADDVKHISRLRKHDFGRLSKMFLTGLKGVHKETGERASILDFMWNTNDNLMQLLSECYTFSDEITKLQEAYYAK

SEQ ID NO: 1180 - protein, 662 aa, Lactobacillus sp.
PGFFVRLHQSWVSPLDKDRKKYQAIVFPTAKEDQAFYKHYATIYHLRDELMTQDRQFDLREIFLAIHHIVKYRGNFLQDTPVKDFEASKIEVGPILSHINNAFAEKIVEEQDPIELNVANATDIEAVIRGKDAEKTVYKMDKVKKIAKLLTDSTAKEEKNLAKQIANAIMGYKTQFETILGKEIDKSDKAQWEFKLTDGDADDKLDALLPDLDETDQTIIAEIKKLFSAITLSTIVDENKSLSQSMVAKYDKHHQDYKLLKAYIDTLQDRSIAKKLLLAYDLYVNNRHGRLLEAKKTFEDKKKKKALTKDEFYKIVKDNLDDSDLAHEIRQEIAADNFMPKQRTNSNGVIPFQLHQIELDKIIANQSQYYPFLAAENPVEDHRKQAPYKLDELVRFRVPYYVGPMITADQQKKTSGKSFAWMVRKEDGQITPWNFEQKVDRQESANKFIKRMTIKDTYLLGEDVLPANSLLYQRFEVLNELNNIRINGSRISVDLKQQIFNDLFEEKKTVTEKSLTSYLKQNLHLPTVEIKGLADPTKFNSSLASYYHLKSLHVFDKELADPQYQKDFEKIIEYSSIFEDKKIFQDKLHAEFKWLTPEQFKAISTWRLQGWGRLSRKLLVELHDTNGQNIMEQLWDSQKNFMQIVTEPDFKEAIAKENQNVT

SEQ ID NO: 1181 - protein, 659 aa, Treponema putidum
EDFFQRMEESPFYAEDKTILQENTLFNDRDFTDKTYHKAYPTINHLIKAWIENKVKPDPRLLYLACHNIIKKRGHFLFEGDFDSENQFDTSVQALFEYLREDMELDIDADSKKIKEILKDSALKNSDKQNRLNKLLGLKSSDKQKKALTNLISGNKANFADLYDNPDLKDAEKNSISFSKDDFDALSDELASVLGDSFELLLRAKAVYNCSVLSKVIGDEQYLSFAKVKIYEKHKNDLTKLKEVVKKYFPIEYRNIFGYKQSENNNCNYSRYVGVCKSGSKKKVINKTASQEDFYKFLKDILLKRSDVPEANGILTEIETGTFLPKQISKNNAEIPYQLRKIELEKILTNAEKFFSFLKQKDENGLSHSEKIIMLLTFKIPYYIGPINTSHKQYFPDRSWVIKKENAPQEKITPWNFFDHIDKEKTAEAFITSRTNFCTYLIGESVLPKNSLLYSEYTVLNEINNLQIIIDGKNICDVKLKQKIYEELFKKYKKVTQKQISTFIKHEGICNKTDEVIILGIDKECTSSLKSYIELKNIFGKQVDEISTKNMLEDIIRWATIYDEGEGKTILKTKIKAEYEKYYSDEQIKKILNLKLSGWGRLSRKFLESITSEIPGFIEPVNIITAMRETQNNLMELLSSKFKFNENIKKINSGFEDTD

SEQ ID NO: 1182 - protein, 356 aa, unidentified
GLLPSGERRTVLPALDAELRKRYPETETLPYFLRGRALDVKLEPFEIGRCLYHLAQRRGFQGRTAFADPEEKSGGKFGDEMKGLWNEICSSGARTLGEFLARQPAREVRLRGRHTHRLMYEQEFNLIWDAQKQHHPEILTPEHKALLFQALFFQRPLKSVTHLIGDCSLERGEKRAPCWTLQVQRFRVLSAVNNLRVVEPSGKIRPLEPQERELLAAESLRREQLKFSTIRRILKLDKDCRFTVEEGGEDCIPGNATSARIYKVMGDEWLKWPQDRQEALVAILGDTSRYPTDDDLVKELVTALGLPPENATRLCAVALPTGYASISLNAIAKVTPRLEKGMTFAEARRILWPEDF

SEQ ID NO: 1183 - protein, 534 aa, unidentified
GCLPEDFTPQNAGRKFKELIEKPDELKNLPDDWYVYMLRSKALKEPVTQIEFGRILYHLNQRRGYKDIGELMEEIEEKDDTKQGKKYDKWIEQVTIYSVEKKSDLKNKKQEYWVILDDGREGTSIIANIESLTGKEIELEIRRRVKKNSEETFEFALPNRNDWQNKLDALDKQISQSGMHVGEFFWNKIKEDRYFRIRQNFVHREKYIEEFDAIWEKQQEFIPALIDETVKQDVIQRIVRNEKERQKWAKKPLKEFIKNYIIYYQRPLKSQKSKKANCRFEPMIKVINQSTGESLSIENKCMPLSSPLYEEFRIWQKLNNLRYKDINNKNYELTNEQKEALFEKLNNGQTLKESSIFKILGLDKNLYSDFNFDQIEGHTVKSKIASVLKDYDSGKIIGNEEFLYKVWHLLYSVNETEYRKNTLIKWFNLTEEDAKRLAKVRFEKKTGSLSSRAVKKLLPLMRAGKYFDEQSLHDSILFRINNIINGEFDPDVTDDIREFFKEYKSIRDFSGMPYWKAATLVYGSHSTGFSDTRY

SEQ ID NO: 1184 - protein, 373 aa, unidentified
GLIKNIKDLFYNNKITDVWELRALALNEPLSPEDFSRILIHIAKHRGYMMSVDSDDDEIDGDKDGKKDDKKKIKKAIAETERAIKELNYRTYGEYVYKSALDSKKPMRNRGGEYRYFPSNNLLKKEIDIIFKKQFELGNKFATEELKNKYWEIASSIKDSKSFEDMVGACTFFKDEKRAPKNCYSAEKFVLLTSILNTVVIDEDLKEIKIINIKHIDEIINFAENEDGGISYKKLRKFLSIPDTAMFKGISYEKKKKAKGKKETDPEDKVFVNMYGLNALKKICGEKIAKDKGLSLKIMRVLTYFKGVEQRRSKLLEIEELNADMASQLAKLENIKEFVSLSAKAIEILLPYMESGLRYDEAVKTARIDGKIP

SEQ ID NO: 1185 - protein, 639 aa, Eubacterium sp.
CTFFRRLHESDLWPEDKSGDDKYAVFADENYTDKDFHKEYPTIYHLRYELIKNKEPHDVKLVFLALHHIIKNRGHFLFDSLSSAEDFNSAYETMCSYLSDNEIQLNCSDIEQFKAILKDRRQGKIEKTKNLASLFGITKKSDPVSYAVMAVLSGSTVKMCDLFGDDELKTVEKNNISFASGYEENEEIYASVLGDRFELVKILKAVYDWAVLADILDGKKYISEAKVAVYEKHKNDLKTLKKYVKTYLPEKYNEIFKISDGKKDNYVAYSGHIKESGKTGELKKTCNSENFCAYLKKTLGKNADLSYKEMFDEIENKTFMPKQVTKSNGVVPMQVNEEELKAILDNAKDYLSFLNSCDENGVSVYDKIIKIFEYRIPYYVGPLNTHTENSWLKRKDGVKIYPWNFDDVVDIDSSAEKFINNLTSKCTYLPECDVIPKCSLLYSKFTVLNEINNLKLNGEDIPVELKQGIYKDLFMTRRKVTVKQIKDYLKARGCYDNNDVLSGIDTTVKSSLKSYFDFKGFESLTFDDKESIIASSVIFGDDKKLLKKRLKKLFPEKLTDEDIKKICKLKYTGWSRLSKEFLCDVEFTYKKTGEVMNVITALWETNYNLMQILYSEDFCCDGDEKKNLNDKLDELSYTG

SEQ ID NO: 1186 - protein, 370 aa, unidentified
ELIQAQEIKSAFETVLGQPSPWELRAEGLDRLLTGQEFARALFHIIKRRGFKSNRKAAKSSEDGKMIAGIEANRERMREKGFRTAGEMYWSDPFFDLRKRNTTDSYINTVDRGLLEEEIKTLFKRQRELGSVFTKHEFENAILEVFSWQKPYVSGDDIIRMVGTCTFEPNELRAPRYSYHAERFLLLQKINSTTYSTNGDKERFTPEQRKVIEGLAYKNVRVTYAQIRKALDLPEEARFAGLTYLRRPEKKAELVESLECENTVFFELKGYHSIQNACSVDGMWDRVKQNPELMDNLATALTFYKTDEDIEEWLTERGVEKEIINAVSGCEFTKTANLSLVAIKKILPHLEEGLHYSEACAKAGYNHTGL

SEQ ID NO: 1187 - protein, 395 aa, unidentified
GLMPADTAARKELEKLDPYWLRARALAEPLTLHEIGRALFHLNQRRGFSSNRITDADDAEGGAMKQGMAQLQEALEQAGARTLGEFLAKRHRRDREGYRVDPSGQRISKANGNDREASKGVRFRPHAEGSKLLYDFYPTRDMVAHELRQVWVEQAKTHTELTEPLREQLEHVIIAQRPLKKPRVGRCTFRPDEERAPRALPLFQRFRILSELAALEIERPGRPARKLTIPERDLLANLLGSQTSPVSFTKMAKALKLPDDADFNLARGGRKGLDPDKTAAILAKTGKGESFGKGWRSIPFDRQSEIVQRLLNEPDEDALISFLIEECDLSDEQAQAASSARLPQGHGHIGPSMLEELVDVLQNDSVEVVDPQTGEILPRPLTYDQAVVRLGSHHS

SEQ ID NO: 1188 - protein, 382 aa, unidentified
GLLPAFGTSQWDRLMRLDPYDLRSRGLTEALEPEEFGRAIYHLAQRRHFRGRDIESESEDDNADSEELAARAEAKDMLATLRQSGMTLGQWLNQIESGKRKRGIHAARSTVEDEFERLWAAQEAHNDKLKDPEFQSSIRKIIFYQRPVFWRQNTLGSCPLIPGAELCPKGSWLSMQRRMLEKLNNLELVGAGARKLDPEERMAILESLQSQASMSWAGVRKALSSIYRNRNLTGEEKRLKFNLEIGGEKGLIGNPLEQRIAAIVGKSWSAHPHKQKIREALHERLWKADYRKIGTQRVVIQPQKKRRLDRLNAAESIVKEFELPGDLIQPISEISFPSGWEPYSIDALLRIIPELENGTRFGELLVGPELEDWRTKTFPDRI

SEQ ID NO: 1189 - protein, 436 aa, Bifidobacterium bombi
PVEDESQFPAGSNPYIAWQVRAKLAETFIPDVETRKRMISIAIRHIARHRGWRNPYSSVADAERMSHTPSPFMVEYAKKLDFEINDRRTNGFYHSPWQSVDEEGKRLSKSELEKQPKIEDWNDNPINGKTIAQLVVSSLEPQTKIRRDLTHGLQTESTLNIQTEKLHQSDYIHELETIFERQHVDQTTQEQLLEATFHTKNPKAVGAAAKLVGKDALDSRYYRASRATPAFEEYRVMAAIDTLRIREHGTERQLTTDERRKLFDFIKGLPSKKTKNEPSISSLTWGDVADFLGIQRIDLRGLGSLKDGEPVSAKQPPVIETNDIMQKAPDPIAAWWSQANTKERDRFVEFMSNAGAIKDTSDEVRNIDAEISQLLEELTGSELESLDKITLTSGRAAYSSQTLRNITNYMYETGCDLTTARQELYHVGKNWAPPAP

SEQ ID NO: 1190 - protein, 367 aa, unidentified
KVVTANELNNLFIGNKKQKDVWDLRREALYRELNNKEFARIMVHLAKHRGYASNRKSEEPTDSEGKAVLSGITHNKTILQEKSYLTIGEYISTKTKKRNGKDTEGKLNYENSVSREMLINEITTIFERQKEFSNPHAKEELLEEYKNIAFTQRALKSVEGMVANCPFETNKKRAPKASSTFETFRALQKLKNLRMISNEGESALTKEQILQAIQKAKTAKSFTYKTLKTLFALPKEVQFKGLTYFDHKTGEAKEPESAKLLDFSAYQKIKDAIQSSDNLYWNKIEESVNLLDEIAKILSTHKDDKKSLEELNKIIDNPSVCNALISLSFSGFGHISVEAMRKINPYLLEGIDYDKACEMAGYDFKAI

SEQ ID NO: 1191 - protein, 382 aa, Corynebacterium camporealensis
ETKPFEDYSDPYIPWNARVALVNGYIEDDQQRGEYLSIALRHIANHRGWRNPYWKTRSLYSPEGPSDAFETIRKDLEKRAGRPVPKDITVGQLITFARIGTDRIRGEAQNKKTGHNNPAILSARLHQLDHAREINEIAKVQKLDDDLRKHIIDLVFAAESPKGAQLGRVGKDPLQPGKDRALKATDAFQRYRIAALTGNLRIRGTQGNDRLTREQRQLIFDHLVNLPHTEEPSWLNIAEILGIDRGDLLGTATMTDDGERAGSKPPVHDTNRAILSSKVKPLVHWWKAANFDEQKAMLKSLSNAEVDDFDSPAGASVQAFFADLDEKQHDKLDSLHLPMGRAAYSEDTLVRLTERMLNNNQDLYEARLAEFNIAKDWTPPKP

SEQ ID NO: 1192 - protein, 487 aa, unidentified
GFFPATAAERKALETLNPYALRAKGLDKALTPAEFARALFHINQRRGFKSNRKTDKKENDSGALKTAIQKLRESLQGENCRTVGEWLNKRDNSGQTVRARYRQEKHIKEDGKSKIDKYYDLYIDRAMIEHEFDELWSKQAELDPARFNETARAELKDILLHQRPLKPVKPGRCTFLPEEERAPLALPSTQRFRMYQEVNNLRILRDGLKEEPLTLEQRDTLIFALEENNKCSFTRIKKLLGLSGAVQFNFEDPKRQELKGNTTSAILGKKDLFGPDWFKFDETKQDAIVMKLLTEESEETLVRWLQNETGVDEKTAEAIANAGLPEGYGSLSAQALARILPELRRDVVTYDKAVKAAGFEHHSKLGSDTEIPSITFKTERIDLDTGEIKAFHIHDKLPYYGEYLQRHVGFGSGKPEDTPEKRYGKITNPTVHIGLNQVRLVVNALIQRYGHPSEVIVEVARELKQNHEQRKEESKRQAENQDRNKRL

SEQ ID NO: 1193 - protein, 368 aa, unidentified
GLLPTDDPKQWPAELAQADPYDLRDRGLSQKLSPHEVGRALFHILKRRGFQSARIAAVEPSDPAKEKEDEGIKAEISQIAAELQGRTLGQWLKSQSKRRGHHTARTMTQEEFERFWTAQVKYHPDLLTDNLRAALAETAFRQRPIFWRLKTLGTCLLEKDAPLCPKGAWIGQRFEMLQTLNNLRLAGGNARPLDEDERRLLLAALETSPSLSFPAARKLLKPVWQRNGTSLKTKFNFEVEGGKKALPGNALEAALIDAFGEAWNTHPKKDAIRAELQDRLWAIQYRKLGEKRVEIRDGNSAEAERQRFIAFAQAEWNASRKTAETLSRIEPPAAWLRHSIKAIQKLLPHMEAGLTYAEARKLVYPEQF

SEQ ID NO: 1194 - protein, 540 aa, Legionella pneumophila
RDLNAKEETALCHYLNNRGYTYVDTDLDEYIKDETTINLLKELLPSESEHNFIDWFLQKMQSSEFRKILVSKVEEKKDDKELKNAVKNIKNFITGFEKNSVEGHRHRKVYFENIKSDITKDNQLDSIKKKIPSVCLSNLLGHLSNLQWKNLHRYLAKNPKQFDEQTFGNEFLRMLKNFRHLKGSQESLAVRNLIQQLEQSQDYISILEKTPPEITIPPYEARTNTGMEKDQSLLLNPEKLNNLYPNWRNLIPGIIDAHPFLEKDLEHTKLRDRKRIISPSKQDEKRDSYILQRYLDLNKKIDKFKIKKQLSFLGQGKQLPANLIETQKEMETHFNSSLVSVLIQIASAYNKEREDAAQGIWFDNAFSLCELSNINPPRKQKILPLLVGAILSEDFINNKDKWAKFKIFWNTHKIGRTSLKSKCKEIEEARKNSGNAFKIDYEEALNHPEHSNNKALIKIIQTIPDIIQAIQSHLGHNDSQALIYHNPFSLSQLYTILETKRDGFHKNCVAVTCENYWRSQKTEIDPEISYASRLPADSVR

SEQ ID NO: 1195 - protein, 372 aa, unidentified
GLLPPEIAADDAKPEIILNALGDPYELRTKALDEPLQPYELGRVLLHLCARRGFLSNRKAHLVAYLAEEFSDYLAQIDDTDDAANSSASTEDLGKVKDGIKKLSEEIHVSGCRTLGEYLYRLDRHTRKRARFTSRQMYLDEFEMIWESQARYNPILTDDLKIQVHQVIFFQRPLKSQKSLVGKCLLEPGRKRTAKARLEAQQFRIWQDINHIEIQNPETRAWRRLTQEERQKLFHALHEKKSLSWSGVRKLLGIHRGERINLEEAKDKLIGNLTWIELSEALGDRWSRMSDTERQSLVEDLLTISDLTARARRLREHWKLSREEQYLLCTWEPQPGYTNHSLKAIRAMLPYLERGAIYSEARQAAGYKYEVL

SEQ ID NO: 1196 - protein, 558 aa, unidentified
NWITDHTVLTENGNKSTFETFKLRSEAAERALELNELARVLLHINKKRGYKSSRKVNNTEEGQLIDGMDIAKKLYHENITPGEFVLELLKSGKKKIPDFYRSDLNNEFEKIWNNQAKYHPDIFTNSLKDELKGKGKQATWAILKDPLKLVGVKRDKKRDEIKLENYQWRVDALTQQLNFEQIAVVLQEINGQINNSSGYLGAISDRSKELYFNNQTVGQYLYSQLKANPHTRLKNQVFYRQDYMDEFEKIWEVQSKGREHIFTDTLKCEIRDVIIFYQRKLKSQKGLISFCEFEQKEISVGDKKKIVGLRVAPKSSPLFQEFKIWQNLHNVKIKNKNTKEVLVLNQDEKNCLFSELNVKGKLTANQVLKLIKGNPKDWEINYTELDGNRTNQALFDAYLSILEIEGYDVREELKLKLNKDDITLADIDKPAAEIMHMVETIFKHLKIDTNILHFNPLIEGNSFEKQASYQLWHLLYSYEEDNSPTGMETLYRLLGEKFGFNKEQAKIIANVSFQDDYGSLSSKAIRKIFPYIKESDFSTSCELAGYNHSKNSLTKEEI

SEQ ID NO: 1197 - protein, 424 aa, unidentified
DMAPQGDFKDQAYWLSPEFLKWVALNPYELRHRAITEKIALKELGRVFYHLAQHRGFQSNARNVSDNDDSTIYKGGNGMTGIDTTASLIENETLGSALYQKLFPAPGQPFKYFPERIRRRYTTRKMYIDEFEKIWEEQSRFHPELTQQLNEEIGGRRREGYKRDGVLFFQRPLRSQKSKIGKCTFHPNKSRRAISAPDFEEFRIWQFINSIRCNGESLVDADRQLVYNLLVSQDRVKFDKLRKHLGKASAAYSFNFDDETSCPNAPTLRFLSSRGIFSQSWFGFKKSKQEEIWHDLYFYDDKELLRKRAQEKWGLSEDAATKFGDYSLKQGFASLSRRAIQNILPFLALGHDYDVAVTLGGIKNALGDQNIVDIYDTDFRIAVEEIVRTNPRGGYINHLKAWLKDNYGFEDKRLEKLYHHSADV

SEQ ID NO: 1198 - protein, 638 aa, Acidaminococcus intestini
ISPIDPRFFIRLHESALWRDDVAETDKHIFFNDPTYTDKEYYSDYPTIHHLIVDLMESSEKHDPRLVYLAVAWLVAHRGHFLNEVDKDNIGDVLSFDAFYPEFLAFLSDNGVSPWVCESKALQATLLSRNSVNDKYKALKSLIFGSQKPEDNFDANISEDGLIQLLAGKKVKVNKLFPQESNDASFTLNDKEDAIEEILGTLTPDECEWIAHIRRLFDWAIMKHALKDGRTISESKVKLYEQHHHDLTQLKYFVKTYLAKEYDDIFRNVDSETTKNYVAYSYHVKEVKGTLPKNKATQEEFCKYVLGKVKNIECSEADKVDFDEMIQRLTDNSFMPKQVSGENRVIPYQLYYYELKTILNKAASYLPFLTQCGKDAISNQDKLLSIMTFRIPYFVGPLRKDNSEHAWLERKAGKIYPWNFNDKVDLDKSEEAFIRRMTNTCTYYPGEDVLPLDSLIYEKFMILNEINNIRIDGYPISVDVKQQVFGLFEKKRRVTVKDIQNLLLSLGALDKHGKLTGIDTTIHSNYNTYHHFKSLMERGVLTRDDVERIVERMTYSDDTKRVRLWLNNNYGTLTADDVKHISRLRKHDFGRLSKMFLTGLKGVHKETGERASILDFMWNTNDNLMQLLSECYTFSDEI

SEQ ID NO: 1199 - protein, 675 aa, Coriobacterium glomerans
MEQADPDFFIRLRQSRLLRDDRAEEHADYRWPLFNDCKFTERDYYQRFPTIYHVRSWLMETDEQADIRLIYLALHNIVKHRGNFLREGQSLSAKSARPDEALNHLRETLRVWSSERGFECSIADNGSILAMLTHPDLSPSDRRKKIAPLFDVKSDDAAADKKLGIALAGAVIGLKTEFKNIFGDFPCEDSSIYLSNDEAVDAVRSACPDDCAELFDRLCEVYSAYVLQGLLSYAPGQTISANMVEKYRRYGEDLALLKKLVKIYAPDQYRMFFSGATYPGTGIYDAAQARGYTKYNLGPKKSEYKPSESMQYDDFRKAVEKLFAKTDARADERYRMMMDRFDKQQFLRRLKTSDNGSIYHQLHLEELKAIVENQGRFYPFLKRDADKLVSLVSFRIPYYVGPLSTRNARTDQHGENRFAWSERKPGMQDEPIFPWNWESIIDRSKSAEKFILRMTGMCTYLQQEPVLPKSSLLYEEFCVLNELNGAHWSIDGDDEHRFDAADREGIIEELFRRKRTVSYGDVAGWMERERNQIGAHVCGGQGEKGFESKLGSYIFFCKDVFKVERLEQSDYPMIERIILWNTLFEDRKILSQRLKEEYGSRLSAEQIKTICKKRFTGWGRLSEKFLTGITVQVDEDSVSIMDVLREGCPVSGKRGRAMVMMEILRDEELGFQKKV

SEQ ID NO: 1200 - protein, 673 aa, Eggerthella sp.
MAEKDPEFFIRLRQSSLWPEDREGGHTAYHWPLFNDSDFNEKEYYEKFPTIFHLRQWLMETDEKADIRLIYLAFHNIVKHRGNFLQENNDSLSAQNANMRESLESFCIALEEWCDEKELTCSCDPQKLEHLFKEVKYRSDIRDGFAALLGLACSGENEVDVKAMAKEMGKAIVGYKADFSKIFTECDKEGSSFRLSDDEGPEAFLDICPDDGIALFEAIQMVYSSFILTGMLTEKGLSLSKISAYNQYGQDLESLKALVKEYVPNEYSSFFRGPTYSGSTEYDPSKAQGYTRYNLGPSKKGSGAKPMAYEDFKKSVEQLFANTNAINDERYKEMMGRFAEEKFLRRLRTSDNGRIPFQLNLEEMTAIIINQGKYYPFLLEQQEKLESLVRFRIPYYVGPLTRINARLDSKGNACFAWSKRKDGMDSASIKPWNWDEVIDKHASAQAFIERMTGTCTYLRGEPVLPRCSLLYEEYCVLNELNGARWTQDGDKFIRFDYKDRSDIIEELFKKRRGRIQYAAVADWMKQERSHANVHVSGGQGENAFESRLSSYHFFCNDVFGVDELPGSYVDMVEEIILWSTLFEDRSILREEIQRKYGDVLNEEQIKTICKKRFSGWGRLSRKLLCSLKAQTDNGPKSIMDILQEGDQNNGRVGRAMVFQEILHDEQLGFEQKI

SEQ ID NO: 1201 - protein, 647 aa, Finegoldia magna
IKKVDKDFYDRLDESKFWAEDKKVSGKYSLFNDKNFSDKQYFEKFPTIFHLRKYLMEEHGKVDIRYYFLAINQMMKRRGHFLIDGQISHVTDDKPLKEQLILLINDLLKIELEEELMDSIFEILADVNEKRTDKKNNLKELIKGQDFNKQEGNILNSIFESIVTGKAKIKNIISDEDILEKIKEDNKEDFVLTGDSYEENLQYFEEVLQENITLFNTLKSTYDFLILQSILKGKSTLSDAQVERYDEHKKDLEILKKVIKKYDEDGKLFKQVFKEDNGNGYVSYIGYYLNKNKKITAKKKISNIEFTKYVKGILEKQCDCEDEDVKYLLGKIEQENFLLKQISSINSVIPHQIHLFELDKILENLAKNYPSFNNKKEEFTKIEKIRKTFTFRIPYYVGPLNDYHKNNGGNAWIFRNKGEKIRPWNFEKIVDLHKSEEEFIKRMLNQCTYLPEETVLPKSSILYSEYMVLNELNNLRINGKPLDTDVKLKLIEELFKKKTKVTLKSIRDYMVRNNFADKEDFDNSEKNLEIASNMKSYIDFNNILEDKFDVEMVEDLIEKITIHTGNKKLLKKYIEETYPDLSSSQIQKIINLKYKDWGRLSRKLLDGIKGTKKETEKTDTVINFLRNSSDNLMQIIGSQNYSFNEYI

SEQ ID NO: 1202 - protein, 640 aa, Lactobacillus rhamnosus
ITKIDPDFFLRQKYSEISPKDKDRFKYEKRLFNDRTDAEFYEDYPSMYHLRLHLMTHTHKADPREIFLAIHHILKSRGHFLTPGAAKDFNTDKVDLEDIFPALTEAYAQVYPDLELTFDLAKADDFKAKLLDEQATPSDTQKALVNLLLSSDGEKEIVKKRKQVLTEFAKAITGLKTKFNLALGTEVDEADASNWQFSMGQLDDKWSNIETSMTDQGTEIFEQIQELYRARLLNGIVPAGMSLSQAKVADYGQHKEDLELFKTYLKKLNDHELAKTIRGLYDRYINGDDAKPFLREDFVKALTKEVTAHPNEVSEQLLNRMGQANFMLKQRTKANGAIPVQLQQRELDQIIANQSKYYDWLAKPNPVEKHRASKPYQLDELLTFRIPYYVGPLITPKEQAESRENVFAWMIRKDPSGNITPYNFDEKVDCPASANMFIQRMKNTDTYLIGEDVLPKRSLLYQKYEVLNELNNVSIDGRRLGADQKQRLIREVFERHSSVTIKQVAENLVAHGDFAKRPEIRGLADEKRFLSSLSTYHQLKKILHEAIDDPTKEHDIENIITWSTVFEDAAIFKTELAKISWLDSDTIKALSNIRYRGWGQFSRKLLDGLKLGNGHTVIQELMLSNHNLMQILTDETLKTT

SEQ ID NO: 1203 - protein, 451 aa, Mycoplasma gallisepticum
NSYFGFKNKEDILNNYQEQQKLHNTVLNLKLEALNAKIDPKALSWILHDYLKNRGHFYEDNRDFNVYPTEELANYFGEYGYYKGIIDSKEDNDDKLEEGLTKYKFSNQHWLEEIKKVLSNQTGLPEKFKEEYESLFSYVRNYSEGPGSINSVSPYGIYHLDEKEGKVVQKYNNIWDKTIGKCSIFPDEYRAPKNSPIAMIFNEINELSTIRSYSIYLTGWFINQEFKKAYLNKLLDLLIKTNSEKPIDARQFKKLREETIAESIGKETLKDVEREEKLEKEDHKWKLKGLKLNTNGKIQYNDLSSLAKFVHKLKQHLKLDFLLEDQYTTLDKINFLQSLFVYLGKHLRYSNRVDSANLKEFSDSNKLFERVLQEQKDDLFKLFEQTDKDDEKILAQTHSLSTKAMLLAITRMTNLDNDEDNQKNNDKGWNFEAIKNFDQKFIDITKKNNNL

SEQ ID NO: 1204 - protein, 618 aa, Streptococcus agalactiae
MSKVDDSFFHRLEDSFLVEEDKRGSKYPIFATMQEEKYYHEKFPTIYHLRKELADKKEKADLRLVYLALAHIIKFRGHFLIEDDRFDVRNTDIQKQYQAFLEIFDTTFENNHLLSQNVDVEAILTDKISKSAKKDRILAQYPNQKSTGIFAEFLKLIVGNQADFKKHFNLEDKTPLQFAKDSYDEDLENLLGQIGDEFADLFSVAKKLYDSVLLSGILTVTDLSTKAPLSASMIQRYDEHHEDLKHLKQFVKASLPENYREVFADSSKDGYAGYIEGKTNQEAFYKYLLKLLTKQEGSEYFLEKIKNEDFLRKQRTFDNGSIPHQVHLTELRAIIRRQSEYYPFLKENQDRIEKILTFRIPYYVGPLAREKSDFAWMTRKTDDSIRPWNFEDLVDKEKSAEAFIHRMTNNDLYLPEEKVLPKHSLIYEKFTVYNELTKVRFLAEGFKDFQFLNRKQKETIFNSLFKEKRKVTEKDIISFLNKVDGYEGIAIKGIEKQFNASLSTYHDLKKILGKDFLDNTDNELILEDIVQTLTLFEDREMIKKCLDIYKDFFTESQLKKLYRRHYTGWGRLSAKLINGIRNKENQKTILDYLIDDGSANRNFMQLINDDDLSFKPII

SEQ ID NO: 1205 - protein, 619 aa, Streptococcus dysgalactiae
MSKVDDSFFHRLEESFLVEEDKKHERHPIFGNIVDEVAYHEKYPTIYHLRKKLADSTDKADLRLIYLALAHMIKFRGHFLIEGDLNPDNSDMDKLFIQLVQTYNQLFEENPINASRVDAKAILSARLSKSRRLENLIAQLPGEKRNGLFGNLIALSLGLTPNFKSNFDLAEDAKLQLSKDTYDDDLDNLLAQIGDQYADLFLAAKNLSDAILLSDILRVNSEITKAPLSASMIKRYDEHHQDLTLLKALVRQQLPEKYKEIFFDQSKNGYAGYIDGGASQEEFYKFIKPILEKMDGTEELLAKLNREDLLRKQRTFDNGSIPHQIHLGELHAILRRQEDFYPFLKDNREKIEKILTFRIPYYVGPLARGNSRFAWMTRKSEETITPWNFEEVVDKGASAQSFIERMTNFDKNLPNEKVLPKHSLLYEYFTVYNELTKVKYVTEGMRKPEFLSGKQKEAIVDLLFKTNRKVTVKQLKEDYFKKIECFDSVEISGVEDRFNASLGTYHDLLKIIKDKDFLDNEENEDILEDIVLTLTLFEDKEMIEERLKKYANLFDDKVMKQLKRRHYTGWGRLSRKLINGIRDKQSGKTILDFLKSDGFANRNFMQLINDDSLTFKEAI

SEQ ID NO: 1206 - protein, 619 aa, Streptococcus gallolyticus
AKVDESFFYRLDESFLTTDDKDFERHPIFGNKADEIKYHQEFPTIYHLRKHLADSHEKADLRLIYLALAHMIKFRGHFLIEGELNAENTDVQKLFEAFVEVYDRTFDDSNLSEITVDASSILTEKFSKSRRLENLIKHYPTEKKNTLFGNLVALALGLQPNFKTSFKLSEDAKLQFSKDTYEEDLEELIGKIGDEYADLFTSAKNLYDAILLSGILTVADNTTKAPLSASMIKRYNEHQVDLKKLKEFIKNNASDKYDEIFNDKDKNGYAGYIENGVKQDEFYKYLKTTLSKIDGSDYFLDKIEREDFLRKQRTFDNGSIPHQIHLQEMHAILRRQGEHYAFLKENQAKIEKILTFRIPYYVGPLARKNSRFAWAEYHSDEKITPWNFDEIIDKEKSAEKFITRMTLNDLYLPEEKVLPKHSLVYETYTVYNELTKVKYVNEQGKSNFFDANMKQEIFEHVFKENRKVTKDKFLNYLNKEFPEYRIQDLIGLDKENKSFNASLGTYHDLKKILDKSFLDDKTNETIIEDIIQTLTLFEDRDMIRQRLQKYSDIFTPQQLKKLERRHYTGWGRLSYKLINGIRNKENGKSILDYLIDDGYANRNFMQLISDDTLPFKQII

SEQ ID NO: 1207 - protein, 386 aa, Streptococcus gordonii
GLLTDFSKVSMNLNPYQLRVQGMENQLTNEELFVALKNIVKRRGISYLDDASEDGGTVSSDYGKAVEENRKLLAEKTPGQIQLERFEKYGQLRGDFTVEENGEKHRLINVFSTSAYRKEAERILRKQQEFNSKITDEFIEDYLIILTGKRKYYHGPGNEKSRTDYGRFRTDGTTLDNIFGILIGKCTFYTEEYRASKASYTAQEFNLLNDLNNLTVPTETKKLSEEQKKLIIEYAKSAKTLGASTLLKYIAKMIDASVDQIRGYRVDVNNKPEMHTFEVYRKMQSLETIKVEELPRKVLDELAHILTLNTEREGIEEAINSKLKDIFNRDQVLELVQFRKNNSSLFSKGWHNFSIKLMMELIPELYETSEEQMTILTRLGKQRSKE

SEQ ID NO: 1208 - protein, 620 aa, Streptococcus mutans
MGKVDDSFFHRLDESFLTDDDKNFDSHPIFGNKAEEDAYHQKFPTIYHLRKHLADSTEKADLRLVYLALAHMIKFRGHFLIEGELNAENTDVQKLFADFVGVYDRTFDDSHLSEITVDASSILTEKISKSRRLEKLINNYPKEKKNTLFGNLIALSLGLQPNFKTNFKLSEDAKLQFSKDTYEEELEVLLAQIGDNYAELFLSAKKLYDSILLSGILTVTDVSTKAPLSASMIQRYNEHQMDLAQLKQFIRQKLSDKYNEVFSDVSKDGYAGYIDGKTNQEAFYKYLKGLLNKIEGSGYFLDKIEREDFLRKQRTFDNGSIPHQIHLQEMRAIIRRQAEFYPFLADNQDRIEKILTFRIPYYVGPLARGKSDFAWLSRKSADKITPWNFDEIVDKESSVEAFINRMTNYDLYLPNQKVLPKHSLLYEKFTVYNELTKVKYKTEQGKTAFFDANMKQEIFDGVFKVYRKVTKDKLMDFLEKEFDEFRIVDLTGLDKENKAFNASYGTYHDLRKILDKDFLDNSKNEKILEDIVLTLTLFEDREMIRKRLKNYSDLLTKEQLKKLERRHYTGWGRLSAELIHGIRNKESRKTILDYLIDDGNSNRNFMQLINDDALSFKEEI

SEQ ID NO: 1209 - protein, 393 aa, Streptococcus salivarius
GLITDFTNVSINLNPYQLRVKGLTDELSNEELFIALKNMVKHRGISYLDDASDDGNSSVGDYAQIVKENSKQLETKTPGQIQLERYQKYGQLRGDFTVEEDGKKHRLINVFPTSAYRAEALRILQTQQEFNPQITDEFINSYLQILTGKRKYYHGPGNEKSRTDYGRYTTKKDSEDEYITLDNIFGILIGKCTFYPEEYRAAKASYTAQEFNLLNDLNNLTVPTETKKLSEEQKNQIITNVKNEKAMGPAKLFKYIAKLLSCDVADIKGYRIDKSDKAEIHTFEAYRKMKTLATIDIEQMERENLDKLAYVLTLNTEKEGIQEALEHEFADGTFSQEQIDELVQFRKANSSIFGKGWHSFSVKLMMELIPELYATSEEQMTILTRLGKQKTTS

SEQ ID NO: 1210 - protein, 386 aa, Streptococcus suis
HINLDGEMSTDNPYVLRVKGLSQKLTVEELYISIKNIMKRRGISYLDDAESDNEAGRSDYAKAIERNRQLLTSKTPGEIQLERLEKYGQLRGNFTIIDEEGQSQQIINVFSTSDYVKEVEKILDCQKMYHKFISDEFCDKLIELLREKRKYYVGPGNEKSRTDYGIYRTDGTTLENLFGILIGKCTFYPDQYRSSRASYTAQEFNFLNDLNNLTVPTETKKLSQEQKEFLVNYAKETSVLGAGKILQQIAKLADCKVEDIRGYRLDNKDKPELHTFETYRAMKGLVPLVDIGVLSREQLDILADILTLNTDFEGIREALKKQLPNVFDEKQVKGLASFRKSKSQLFAKGWHNLSQKIMLEVIPELYATSDEQMTILTRLGKFEKSS

SEQ ID NO: 1211 - protein, 387 aa, Streptococcus thermophilus
GLITDFTKISINLNPYQLRVKGLTDELSNEELFIALKNMVKHRGISYLDDASDDGNSSVGDYAQIVKENSKQLETKTPGQIQLERYQTYGQLRGDFTVEKDGKKHRLINVFPTSAYRSEALRILQTQQEFNSQITDEFINRYLEILTGKRKYYHGPGNEKSRTDYGRYRTNGETLDNIFGILIGKCTFYPDEFRAAKASYTAQEFNLLNDLNNLTVPTETKKLSKEQKNQIINYVKNEKVMGPAKLFKYIAKLLSCDVADIKGHRIDKSGKAEIHTFEAYRKMKTLETLDIEQMDRETLDKLAYVLTLNTEREGIQEALEHEFADGSFSQKQVDELVQFRKANSSIFGKGWHNFSVKLMMELIPELYETSEEQMTILTRLGKQKTTS

SEQ ID NO: 1212 - protein, 653 aa, Treponema denticola
IAKTDEGFFQRMKESPFYAEDKTILQENTLFNDKDFADKTYHKAYPTINHLIKAWIENKVKPDPRLLYLACHNIIKKRGHFLFEGDFDSENQFDTSIQALFEYLREDMEVDIDADSQKVKEILKDSSLKNSEKQSRLNKILGLKPSDKQKKAITNLISGNKINFADLYDNPDLKDAEKNSISFSKDDFDALSDDLASILGDSFELLLKAKAVYNCSVLSKVIGDEQYLSFAKVKIYEKHKTDLTKLKNVIKKHFPKDYKKVFGYNKNEKNNNNYSGYVGVCKTKSKKLIINNSVNQEDFYKFLKTILSAKSEIKEVNDILTEIETGTFLPKQISKSNAEIPYQLRKMELEKILSNAEKHFSFLKQKDEKGLSHSEKIIMLLTFKIPYYIGPINDNHKKFFPDRCWVVKKEKSPSGKTTPWNFFDHIDKEKTAEAFITSRTNFCTYLVGESVLPKSSLLYSEYTVLNEINNLQIIIDGKNICDIKLKQKIYEDLFKKYKKITQKQISTFIKHEGICNKTDEVIILGIDKECTSSLKSYIELKNIFGKQVDEISTKNMLEEIIRWATIYDEGEGKTILKTKIKAEYGKYCSDEQIKKILNLKFSGWGRLSRKFLETVTSEMPGFSEPVNIITAMRETQNNLMELLSSEFTFTENI

SEQ ID NO: 1213 - protein, 614 aa, Lactobacillus animalis
LAKVDPNFLYRLEESSLVAEDKKYDVYPIFGKREEELLYHDTYKTIYHLRSALANNDQPADLRLVYLALAHIIKYRGNFLLEGEIDLRTTDINKVFAEFSETLNENSDENLGKLDVADIFKNNTFSKTKKSEELLKLSGAKKNQLAHQLFKMMVGNMGSFKKVLGTDEEHKLSFGKDTYEDDLNDLLAEAGDQYLDIFVAAKKVYDAAILASILDVKDTQTKTVFSQAMIERYEEHQKDLIELKRVFKKYLPEKCHDFFSEPKISGYAGYIDGKVSEEDFYKYTKKTLKGIPETEEILQKIDANNYLRKQRTFDNGAIPHQVHLKELVAIVENQGKYYPFLRENKDKFEKILNFRIPYYVGPLARGNSKFAWLTRAGEGKITPYNFDEMIDKETSAEDFIKHMTINDLYLPTEPVLPKHSLLYERYTIFNELAGVRYVTENGEAKYFDAQTKRSIFELFKLDRKVSEKMVIKHLKVVMPAIRIQALKGLDNGKFNASYGTYKDLVDMGVAPELLNDEVNSEKWEDIIKTLTIFEGRKLIKRRLENYRDFLGEDILRKLSRKKYTGWGRLSAKLLDGIYDKKTHKTILDCLMTEDYSQNFMQLINDDNYSFKETI

SEQ ID NO: 1214 - protein, 661 aa, Lactobacillus ceti
LAKVDPQFLLRLKESQYHMEDKSTDDKYVLFNDQNRTDGEFFTEYPTIYHLRSELMQGKKEDIRAVYLALHHIVKYRGHFLLPGDNYDMQGNLSELIKRLFKFIEETLFIEDLGLTDEIQSKIEEILLTKTKTRLDRQKEIVKLFNTKHQKLDDKQKKLLEAIFKLCLGLKGNMVNIFGDKGEYGIDFTDVEDKKKKVEFSADYDNNINDYVDFFGEYFELLEITKKINDTVIFSEILVDGKGFSESKVISYEKHQQDLRKLKTLLKSLDKTLGYKYGEGLYQKILLDDVKSNYVNYSGNSQKLKKCTKDEFYGFIKSKLNSVTKKEKVSEAQQKEIAQILADMEFGDYLPLQRTTDNGVIPNQLHKKELIEIIEQQTKYHDFFNDVDENGLTIKDKIISLMTFRIPYYVGPLNDYHKVADGTGHAWIEKKKDGKIYPWNFDEMVDTEATAEKFIKNLTNKCTYLKGEDVLPKESKLYSEFMLLNELNNIKIDNQKLDPKLKMKMVSELFMKKNEKITKKKIVDYLRSIGQANGNEMVSGIDREIKSDLKTIHKIQHYYQDASLEMAENIIRWNTIFNDSTSDILKDKITKAYGDVLTPGQIKGLSNLACKDWGKLSEKFLTGIRCDVGEFKNISIIQAMRDTNNNLMELLSNKYEFMDKI

SEQ ID NO: 1215 - protein, 644 aa, Tissierellia bacterium
ISKIDNTFFKRLKESNLYNEDKSIKFNYPLFNDKDYTDIDFYNEYKTIYHLRKDLIFEDKKFDIRLVFIALHHILKYRGHFIFEGQSFEEIKSFDSIFTQLSSYFLENFDFNIDVSIKEKLEEIILSDNTKSIKKTEFKKIFSDNKVLSVLNMAIGSKVSLKDVFNNEELKEQKISFSEIDYENEKRDEFYQLLGEDIFLIDLAKKIYDFMVLKKILKNTDSFSASKVALYCEHKKDLDDLKYIFKKYLTKEDYFKFFRSNVEKINYPSYIGLNKIKSKKIIKENKCSISDINKELKNKYLKDIKLEAKDKELFNRIFNKLDEFKFLEKLKSSENSTVPYQVHEIELKKILDNQRKYYPFLNEKIDGKSVYEKIIQLFEFKIPYYIGPLNTDPNVKGKNTWVVRKDENNKTPITPWNFEQKVDMQKSAEEFIKRMTNRCTYLKAEDVIAKNSLLYEEFILLNELNKVTVDNEILHPTLKTEIINELFKTTVKVTKKKFIEFLKKKQAVNDVESITGIGVEFNCKLQGYNTFRKILGKKIENVNVKNFVEKCIELKCLYGSDKKLFENAIGKIYREYNITDEEFNKINRLNFNKWARLSKKFLTEISFEKTDGTKRFESVIEALRSTNYNLMELLSDKFNLQSKI

SEQ ID NO: 1216 - protein, 653 aa, Veillonella parvula
MAQVDPTFFMRLRESKYHYEDKTTGHSSKHILFIDKNYNDQDYFKEYPTVYHLRSELMKSGTDDIRKLFLAVHHILKYRGNFLYEGATFDSNASTLDDVIKQALENITFNCFDCNSAISSIGQILMEAGKTKSDKAKAIEHLVDTYIATDTVDTSSKTQKDQVKEDKKRLKAFANLVLGLNASLIDLFGSVEELEEDLKKLQITGDTYDDKRDELAKAWSDEIYIIDDCKSVYDAIILLSIKEPGLTISESKVKAFNKHKDDLAILKSLLKSDRSIYNTMFKVDEKGLHNYVHYIKQGRTEETSCNREDFYKYTKKIVEGLSDSKDKEYILSQIELQILLPLQRIKDNGVIPYQLHLEELKAILAKCGPKFPFLNEVADGFSVAEKLIKMLEFRIPYYVGPLNTHHNVDNGGFAWAVRKASGRVTPWNFDDKIDREKSAAAFIKNLTNKCTYLLGEDVLPKSSLLYSEFMLLNELNNVRIDGKPLEKVVKEHLIEAVFKQDHKKMTKNRIEQFLKDNGYISETHKHEITGLDGEIKNDLASYRDMVRILGDGFDRSMAEEIITDITIFGESKKMLRETLRKKFASCLDDEAIKKLTKLRYRDWGRLSQKLLNGIEGCDKAGDGTPETIIILMRNFSYNLMELLGDKFSFMERI

SEQ ID NO: 1217 - protein, 518 aa, unidentified
GMCPLTNEQLMIWKHWDKNKKSEGRHFPHTKEFIEWLRLNPYELRYKGINGELTKMEFGRFLYHIIQRRGFLSTRKEKETGKIYAGKENMVGIDDTKTELNGNTLGEYLYTIYPEENESYKNIQNEEGEDVRIRGRYTLRDMYVEEFEKIWQNQASRLGLDKVSVIKQKVVFLNGSKDRNRNAKKIKYLKNNRDKIEVQEIIVEREKANKTLTRVTSYENIPLHDHLGGNIEISDDKIKFDNKDSVLFYQRPLRSQKSLLGKCRYEKNKTPVSVSHPDYELFRAWQYVNTIKFGNNIPLPIEQKSAIVEFLRTKKTSVKFADIVKLLNMSHENFNYNYDDKVEGCPSIAQLSKLFSNEGWENNYHNIWHDFYFFDDSEKLFKKLANTKEYKMKNVIKIDDIKKVSIKDDKYASLSLKAVRNILPFLQRGLMYNQAVFLGGVMNAFNYKALSDEIARWDRFADYHDTIIKDILSIIKERNKEGEAIQKVKEYLSDPANHYGFEKESPAFKKLYHHSQEI

SEQ ID NO: 1218 - protein, 631 aa, Enterococcus faecalis
MTDLDENFFARLQESFLVPEDKKWHRHPIFAKLEDEVAYHETYPTIYHLRKKLADSSEQADLRLIYLALAHIVKYRGHFLIEGKLSTENISVKEQFQQFMIIYNQTFVNGESRLVSAPLPESVLIEEELTEKASRTKKSEKVLQQFPQEKANGLFGQFLKLMVGNKADFKKVFGLEEEAKITYASESYEEDLEGILAKVGDEYSDVFLAAKNVYDAVELSTILADSDKKSHAKLSSSMIVRFTEHQEDLKKFKRFIRENCPDEYDNLFKNEQKDGYAGYIAHAGKVSQLKFYQYVKKIIQDIAGAEYFLEKIAQENFLRKQRTFDNGVIPHQIHLAELQAIIHRQAAYYPFLKENQEKIEQLVTFRIPYYVGPLSKGDASTFAWLKRQSEEPIRPWNLQETVDLDQSATAFIERMTNFDTYLPSEKVLPKHSLLYEKFMVFNELTKISYTDDRGIKANFSGKEKEKIFDYLFKTRRKVKKKDIIQFYRNEYNTEIVTLSGLEEDQFNASFSTYQDLLKCGLTRAELDHPDNAEKLEDIIKILTIFEDRQRIRTQLSTFKGQFSAEVLKKLERKHYTGWGRLSKKLINGIYDKESGKTILDYLVKDDGVSKHYNRNFMQLINDSQLSFKNAI

SEQ ID NO: 1219 - protein, 386 aa, Streptococcus gallolyticus
DLINKEQIPTSNNPYQIRVKGLSEILSKDELAIALLHLAKRRGIHNINVSSEDEDASNELSTKEQINRNNKLLKDKYVCEVQLQRLKEGQIRGEKNRFKTTDILKEIDQLLKVQKDYHNLDIDFINQYKEIVETRREYFEGPGQGSPFGWNGDLKKWYEMLMGHCTYFPQELRSVKYAYSADLFNALNDLNNLIIQRDNSEKLEYHEKYHIIENVFKQKKKPTLKQIAKEIGVNPEDIKGYRITKSGTPQFTEFKLYHDLKSIVFDKSILENEAILDQIAEILTIYQDEQSIKEELNKLPEILNEQDKAEIAKLIGYNGTHRLSLKCIHLINEELWQTSRNQMEIFNYLNIKPNKVDLSEQNKIPKDMVNDFILSPVVKRTFIQSI

SEQ ID NO: 1220 - protein, 356 aa, Staphylococcus pasteuri
EIVTDFRNLNLNPYELRVKGLTEQLTNEELFAALRTISKRRGISYLDDAEDDSTGSTDYAKSIDENRRLLKTKTPGQIQLERLEKYGQLRGNFTVYDENGEAHRLINVFSTSDYEKEARKILETQADYNKKITAEFIDDYVEILTQKRKYYHGPGNEKSRTDYGRFRTDGTTLENIFGILIGKCSFYPDEYRASKASYTAQEYNFLNDLNNLKVPTETGKLSTEQKEALVEFAKSTATLGPAKLLKEIAKILDCKVDEIKGYREDDKGKPDLHTFEPYRKLKFNLDSVNIDDLSREVLDKLADILTLNTEREGIEDAIRHNLPNQFTEGQISEIIKVRKSQSTAFNKGWHSFSAKL

SEQ ID NO: 1221 - protein, 58 aa, Prevotella histicola
MKKILGLDLGTTSIGWALVYESENADEKSSIVRLGVRVNPLSVDEKGNFEKGKSITTN

SEQ ID NO: 1222 - protein, 59 aa, Chryseobacterium gallinarum
MVERILGLDLGVSSIGWALVEEDVKNPENNKIIKLGVRVNPLTIDEKTNFEKGKSITTN

SEQ ID NO: 1223 - protein, 58 aa, Parabacteroides sp.
MKRILGLDLGTNSIGWALVNEAETDEEVSSIIRLGVRVNPLTVDETQNFEKGKSITTN

SEQ ID NO: 1224 - protein, 58 aa, Capnocytophaga canis
MKHILGLDLGTNSIGWAYVKEAENDTETSEIVDLGVRVNPLTTDEKTNFEKGKPISTN

SEQ ID NO: 1225 - protein, 59 aa, Ornithobacterium rhinotracheale
MNTILGLDLGTNSIGWALIKVLNDKTRLPLEIIDLGVVVIPTDQRTLDKFSKGESISKT

SEQ ID NO: 1226 - protein, 58 aa, Weeksella virosa
MKTILGLDLGTNSIGWALVEQDFENKQGLILGMGSRIIPMDAGIIGKFAEGSSISQTA

SEQ ID NO: 1227 - protein, 58 aa, Flavobacterium frigidarium
MKKILGLDLGTTSIGWSFINESENENETSSIVNTGVRIVPLTSDEEADFKKGNTISIN

SEQ ID NO: 1228 - protein, 41 aa, Rikenellaceae sp.
MEKRLGIDVGTNSLGWAIVEVDDEGCTLLDRGVDIFQEGVA

SEQ ID NO: 1229 - protein, 47 aa, Jejuia pallidilutea
MSKLGLDLGSSSVGWAKNVGGKIVKSGVITFNTGMSKGQSGGYVSPT

SEQ ID NO: 1230 - protein, 44 aa, Caenispirillum salinarum
MPVLSPLSPNAAQGRRRWSLALDIGEGSIGWAVAEVDAEGRVLQ

SEQ ID NO: 1231 - protein, 40 aa, Salinispora pacifica
MPYTLGLDLGSSSLGWALVDEEQQNIIKTGVRVFPGAATD

SEQ ID NO: 1232 - protein, 40 aa, Sulfitobacter donghicola
MRLGLDIGSTSIGWWIYETTDGQITSVIDGGVRIFSDGRD

SEQ ID NO: 1233 - protein, 48 aa, Mucispirillum schaedleri
MAEKKFKYRLGLDLGTNSIGWCMLRLNKDNEPAAVIKSGVRIFHDGRN

SEQ ID NO: 1234 - protein, 51 aa, Mesorhizobium sp.
MGTRYSFDIGTNSIGWAVWRTGRDPKGIFGEKDAPLELLGAGVRLFKDGRN

SEQ ID NO: 1235 - protein, 51 aa, Neisseria meningitidis
MAAFKPNPINYILGLDIGIASVGWAMVEIDEEENPIRLIDLGVRVFERAEV

SEQ ID NO: 1236 - protein, 39 aa, Geobacillus sp.
MRYKIGLDIGITSVGWAVINLDIPRIEDLGVRIFDRAEN

SEQ ID NO: 1237 - protein, 50 aa, Bacillus okhensis
MTDTRDYRIGLDIGTNSIGWAIIELEYNGEQYDKKGLIDAGVRMFDKAEI

SEQ ID NO: 1238 - protein, 47 aa, Tistrella mobilis
MINERLTFGIDLGIGSCGWAVLRHADAAGEPGVIEGLGSWCFDVPET

SEQ ID NO: 1239 - protein, 48 aa, Kingella kingae
MAAKSLNYILGLDLGIASCGWAVVEMDEQENPLRLIDVGVRTFEEAEN

SEQ ID NO: 1240 - protein, 43 aa, Clostridium perfringens
MNKDINYALGLDIGITSVGWAVINLDLNRIEDLGVRIFNAAEN

SEQ ID NO: 1241 - protein, 48 aa, Neisseria sp.
MKKQPQRYILGLDLGIASVGWALILVDGAENPVGLLDCGVRTFERAEV

SEQ ID NO: 1242 - protein, 36 aa, Campylobacter coli
MKILGFDIGINSIGWAFVEDNQLQDCGVRLFTKAED

SEQ ID NO: 1243 - protein, 45 aa, Sulfurospirillum sp.
MVEKILGIDLGISSLGWAVVEYDKDNDENNKIIDCGVRLFTAAET

SEQ ID NO: 1244 - protein, 39 aa, Dechloromonas denitrificans
MSATYTIGLDIGIASVGWCAFGETHILDLGVRAFDKAET

SEQ ID NO: 1245 - protein, 46 aa, Nitratifractor salsuginis
MEDRIVKKILGVDLGITSFGYAILQETGKDLYRCLDNSVVMRNNPY

SEQ ID NO: 1246 - protein, 42 aa, Enterococcus cecorum
MKYIESVSIGFDIGVGSVGYAVINSKTKQILESGVSIFPAAV

SEQ ID NO: 1247 - protein, 37 aa, Facklamia hominis
MYSVGLDIGIASCGYSIINDVNGNIVELGTLLFKSRN

SEQ ID NO: 1248 - protein, 39 aa, Streptococcus sinensis
MNGKILGLDIGVASVGVGILDKKTGEIIHASSRIFPAAT

SEQ ID NO: 1249 - protein, 39 aa, Eubacterium dolichum
MGRLVLGLDIGITSVGFGIIDLDESEIVDYGVRLFKEGT

SEQ ID NO: 1250 - protein, 40 aa, Streptococcus macedonicus
MTNGKILGLDIGIASVGVGIIEAKTGKVVHANSRLFSAAN

SEQ ID NO: 1251 - protein, 38 aa, Turicibacter sp.
MGYTLGLDIGIASVGFGLIDNVDGKILESGVRLFSSAD

SEQ ID NO: 1252 - protein, 41 aa, Bacillus niameyensis
MEKLRRVLGLDIGVSSVGWGIIDQDSGDVIDAGVRLFEEAA

SEQ ID NO: 1253 - protein, 40 aa, Massilibacterium senegalense
MLENYILGLDIGIGSVGYGLIDENQNIIDAGVRLFPEADV

SEQ ID NO: 1254 - protein, 44 aa, Kurthia huakuii
MNYSIGLDIGTTSVGWACINEQHEILRYQNKWAIGVREFEAAQT

SEQ ID NO: 1255 - protein, 59 aa, Streptococcus equinus
MEKSYSIGLDIGTNSVGWSVITDDYKVPAKKMKVLGNTDKKYIKKNLLGALLFDSGETA

SEQ ID NO: 1256 - protein, 59 aa, Streptococcus equi
MKKPYTIALDIGTNSVGWVVVTDDYRVPTKKMKVLGNTERKTIKKNLIGALLFDSGDTA

SEQ ID NO: 1257 - protein, 59 aa, Enterococcus faecium
MKKEYTIGLDIGTNSVGWSVLTDDYRLVSKKMKVAGNTEKSSTKKNFWGVRLFDEGQTA

SEQ ID NO: 1258 - protein, 59 aa, Enterococcus italicus
MKNDYTIGLDIGTNSVGYSVVTDDYKVISKKMNVFGNTEKKSIKKNFWGVRLFESGQTA

SEQ ID NO: 1259 - protein, 59 aa, Streptococcus agalactiae
MNKPYSIGLDIGTNSVGWSIITDDYKVPAKKMRVLGNTDKEYIKKNLIGALLFDGGNTA

SEQ ID NO: 1260 - protein, 59 aa, Streptococcus ratti
MKKPYSIGLDIGTNSVGWAVITDDYKVPAKKMKVLGNTDKNYIKKNLLGALLFDSGNTA

SEQ ID NO: 1261 - protein, 76 aa, Listeria monocytogenes
MQLKIIEGMKKMKKPYTIGLDIGTNSVGWAVLTDQYDLVKRKMKIAGDSEKKQIKKNFWGVRLFDEGQTAADRRMT

SEQ ID NO: 1262 - protein, 50 aa, Lactobacillus sp.
MTKLNQPYGIGLDIGSNSIGFAVVDANSHLLRLKGETAIGARLFREGQSA

SEQ ID NO: 1263 - protein, 48 aa, Pediococcus acidilactici
MGDRKYNLGLDIGTSSIGFAAVDENNQPIRVKGKTAIGVRLFEEGKTA

SEQ ID NO: 1264 - protein, 47 aa, Acidaminococcus sp.
MGKMYYLGLDIGTNSVGYAVTDPSYHLLKFKGEPMWGAHVFAAGNQS

SEQ ID NO: 1265 - protein, 50 aa, Lactobacillus sp.
MTKRIDDYILGLDIGTNSCGWAVTDKKNNLLKLRGKTAIGSHLFDEGHTA

SEQ ID NO: 1266 - protein, 50 aa, Treponema putidum
MKKEIKDYFLGLDVGTGSVGWAVTDTDYKLLKANHKDLWGMRCFETAETA

SEQ ID NO: 1267 - protein, 58 aa, unidentified
MIYSANSMAQVEGDVKNRMRKYILGIDLGVNSLGAALIDSENQAIVWTGVRIFSGPFE

SEQ ID NO: 1268 - protein, 44 aa, unidentified
MSTKKIVGFDLGTNSVGWAVVENSDENAAKIAGAGSRILPLDPK

SEQ ID NO: 1269 - protein, 42 aa, unidentified
MKTLGLDLGIKSVGWALIESDENRENYRILDLGIRLFSSGQA

SEQ ID NO: 1270 - protein, 53 aa, Eubacterium sp.
MGNKLRNVDDYYLGLDIGTESVGWAVTDKYYVIPKFKGNAMWGVHLFDEGETS

SEQ ID NO: 1271 - protein, 39 aa, unidentified
MKYSLGLDIGITSVGWAVLNLDKKRVEALGVRGFNAAED

SEQ ID NO: 1272 - protein, 43 aa, unidentified
MTVRYRLGLDLGTNSIGWAAVALDAEGRPGRLLDGGVRIITPN

SEQ ID NO: 1273 - protein, 43 aa, unidentified
MALIFAFDIGTTSIGSAVINHDPGRKIGKILRLGVRIFPETRE

SEQ ID NO: 1274 - protein, 49 aa, Bifidobacterium bombi
MSQHRRYRIGIDVGLNSVGLAAVEIDANHDNPLDEIPISILNAQSVIHD

SEQ ID NO: 1275 - protein, 45 aa, unidentified
MSKMILGLDLGITSIGWALVNVDDEDAQNNKIIDSGVRIFTIAEH

SEQ ID NO: 1276 - protein, 41 aa, Corynebacterium camporealensis
MQKNYRVGIDVGTHSIGFAAIEVDDHDRPIHILSAMSLIHD

SEQ ID NO: 1277 - protein, 47 aa, unidentified
MFGKMRYRLALDLGSTSLGWAMVRLDKENQPCAVIKAGARIFSDGRN

SEQ ID NO: 1278 - protein, 42 aa, unidentified
MRIWGFDVGTTSIGFAVIDYDSDRKAGRIERLGVRIFPEGVT

SEQ ID NO: 1279 - protein, 52 aa, Legionella pneumophila
MESSQILSPIGIDLGGKFTGVCLSHLEAFAELPNHANTKYSVILIDHNNFQL

SEQ ID NO: 1280 - protein, 41 aa, unidentified
MLGLDIGTNSIGWALIDTDPTTGRAVGIRDCGVRIFQEAVD

SEQ ID NO: 1281 - protein, 44 aa, unidentified
MKKILGLDLGTNSIGWAYVNEAENTNEQSSIIKLGVRVIPLTTD

SEQ ID NO: 1282 - protein, 45 aa, unidentified
MDSKKILGLDLGTNSIGWSLVEINREENQGRILGMGVRIFPEGVE

SEQ ID NO: 1283 - protein, 46 aa, Acidaminococcus intestini
MGKMYYLGLDIGTNSVGYAVTDPSYHLLKFKGEPMWGAHVFAAGNQ

SEQ ID NO: 1284 - protein, 51 aa, Coriobacterium glomerans
MKLRGIEDDYSIGLDMGTSSVGWAVTDERGTLAHFKRKPTWGSRLFREAQT

SEQ ID NO: 1285 - protein, 50 aa, Eggerthella sp.
MNLRHVGNYNIGLDMGTASVGWAAIDEQGELLHFKGKPTWGSRLFDSANT

SEQ ID NO: 1286 - protein, 48 aa, Finegoldia magna
MKSEKKYYIGLDVGTNSVGWAVTDEFYNILRAKGKDLWGVRLFEKADT

SEQ ID NO: 1287 - protein, 49 aa, Lactobacillus rhamnosus
MTKLNQPYGIGLDIGSNSIGFAVVDANSHLLRLKGETAIGARLFREGQS

SEQ ID NO: 1288 - protein, 49 aa, Mycoplasma gallisepticum
MNNSIKSKPEVTIGLDLGVGSVGWAIVDNETNIIHHLGSRLFSQAKTAE

SEQ ID NO: 1289 - protein, 47 aa, Streptococcus agalactiae
MNKPYSIGLDIGTNSVGWSIITDDYKVPAKKMRVLGNTDKEYIKKNL

SEQ ID NO: 1290 - protein, 58 aa, Streptococcus dysgalactiae
MDKKYSIGLDIGTNSVGWAVITDDYKVPSKKFKVLGNTDRHSIKKNLIGALLFDSGET

SEQ ID NO: 1291 - protein, 59 aa, Streptococcus gallolyticus
MTEKNYSIGLDIGTNSVGWAVITDDYKVPAKKMKVLGNTDKKYIKKNLLGALLFDNGET

SEQ ID NO: 1292 - protein, 40 aa, Streptococcus gordonii
MNGLVLGLDIGIASVGVGILEKDTGKIIHASSRLFPAATA

SEQ ID NO: 1293 - protein, 58 aa, Streptococcus mutans
MKKPYSIGLDIGTNSVGWAVVTDDYKVPAKKMKVLGNTDKSHIKKNLLGALLFDSGNT

SEQ ID NO: 1294 - protein, 40 aa, Streptococcus salivarius
MSDLVLGLDIGIGSVGVGILNKVTGEIIHKNSRIFPAAQA

SEQ ID NO: 1295 - protein, 41 aa, Streptococcus suis
MSNGKILGLDIGIASVGVGVIDAQTGEIIHASSRIFPSANA

SEQ ID NO: 1296 - protein, 40 aa, Streptococcus thermophilus; identical to SEQ ID NO: 1294

SEQ ID NO: 1297 - protein, 49 aa, Treponema denticola
MKKEIKDYFLGLDVGTGSVGWAVTDTDYKLLKANRKDLWGMRCFETAET

SEQ ID NO: 1298 - protein, 63 aa, Lactobacillus animalis
MGSNMLKKDYSIGLDIGTNSVGHAVVTDDYKVPTKKMKVFGDTSKKTIKKNMLGVLLFNEGQT

SEQ ID NO: 1299 - protein, 51 aa, Lactobacillus ceti
MSKKYQNTKYYVGLDIGTSSVGWAVTDANYELLKVNGHKTWGSRLFTEAET

SEQ ID NO: 1300 - protein, 50 aa, Tissierellia bacterium
MGKQKFNDYYLGFDIGTNSAGWAVTDLQYKLLRFNKKDMWGSRLFDEAQT

SEQ ID NO: 1301 - protein, 63 aa, Veillonella parvula
METQASNQLISSHLKGYPIKDYFVGLDIGTSSVGWAVTNKAYELLKFRSHKMWGSRLFDEGES

SEQ ID NO: 1302 - protein, 39 aa, unidentified
MTKILGLDLGTNSIGWAVVDKENNKIDNCGVRIFPEGVV

SEQ ID NO: 1303 - protein, 58 aa, Enterococcus faecalis
MKKDYVIGLDIGTNSVGWAVMTEDYQLVKKKMPIYGNTEKKKIKKNFWGVRLFEEGHT

SEQ ID NO: 1304 - protein, 41 aa, Streptococcus gallolyticus
MKEKYILGLDLGITSVGYGIINFETKKIIDAGVRLFPEANV

SEQ ID NO: 1305 - protein, 41 aa, Staphylococcus pasteuri
MTNGKILGLDIGIASVGVGIIEAKTGKVVHANSRLFSAANA

SEQ ID NO: 1306 - protein, 55 aa, Prevotella histicola
YKEKLELLPKSSLHNPVVEKILNQMINVINAVIDEYGKPDEIRIELARELKIGAA

SEQ ID NO: 1307 - protein, 54 aa, Chryseobacterium gallinarum
KEQLEVLPKNSLRNPVVEKILNQMINLVNATISEYGKLDGVRIELARELKKSAQ

SEQ ID NO: 1308 - protein, 55 aa, Parabacteroides sp.
LKGKLEVLPKNSLRNPVVEKILSQMVNVINTIIDTYGKPDEIRVELARELKKSAK

SEQ ID NO: 1309 - protein, 61 aa, Capnocytophaga canis
LRDSLEVLKKNSLRQPVVEKILNQMINLVNALLKKYRTETPNFKFDEIRIELARELKKNAE

SEQ ID NO: 1310 - protein, 60 aa, Ornithobacterium rhinotracheale
SPDKIEFLKQHSIGNPIVEKIINETLKLIKDIWVIHGKSCKNFFSEIHIELSREIKSSSK

SEQ ID NO: 1311 - protein, 60 aa, Weeksella virosa
LEQYLSEFKQHSLRNPIVEQVITETLRVVRDIWKQYGKGAKDYFDEIHIELGREMKNTAE

SEQ ID NO: 1312 - protein, 62 aa, Flavobacterium frigidarium
NNDRVLKDTLELLKKNSLRNPVVEKILNQMINVINAIIKDPEMGKPDEIRVELARELKANNE

SEQ ID NO: 1313 - protein, 104 aa, Rikenellaceae sp.
KRLERLYHPSMIEAYPSASPNGQGLLQLGSPRIPAVRNPMAMRALFRLRVLLNELLREGKIDRGTKINIELARELNDANKRKAIERYQREREAENRKYAEEIRQ

SEQ ID NO: 1314 - protein, 61 aa, Jejuia pallidilutea
YREFLKEFKNRENINLNVEESISAFELWSEQTFEETNDENGKRISNKGHIEILNEKAALKR

SEQ ID NO: 1315 - protein, 55 aa, Caenispirillum salinarum
LRTWTGNAATDHILNQVRKTANEVITKYGNRRGWDPLPSRITVELAREAKHGVIR

SEQ ID NO: 1316 - protein, 91 aa, Salinispora pacifica
LYHHSQEMSVQNNRYYLSELPNLRNPIVQQALQELRTLVNTLVEQYLPDGEQFSKIKVELARELKLPRDVRRRMHWENNQRAERNNDAKIE

SEQ ID NO: 1317 - protein, 100 aa, Sulfitobacter donghicola
VLDRLPYYGEILDRHVIPGTYDDSDDDITRFGRITNPTVHIGLNQLRRLVNRIIEVHGKPDEIVVELARDLKLSQDQKADVERTIKKNTQAAIRRGEKLE

SEQ ID NO: 1318 - protein, 100 aa, Mucispirillum schaedleri
ASEYLEYYGKVLPDSVVDPQIENPKNDEERYGKIANPTVHAALNQLRKLVNELIKLYGKPEQIVIELARDLKNSRKAKDVINKKIAENRKLNEEVDKTLQ

SEQ ID NO: 1319 - protein, 102 aa, Mesorhizobium sp.
ILDALPYYGKVLQRHILPGMMDPADRKDEAKFYGRIMNPSVHIGLNQLRRLVNALIERFGPPDQIVVELARDLKMSAREKEQEQRRNRDNREANEKRTKKLV

SEQ ID NO: 1320 - protein, 80 aa, Neisseria meningitidis
EEKIYLPPIPADEIRNPVVLRALSQARKVINGVVRRYGSPARIHIETAREVGKSFKDRKEIEKRQEENRKDREKAAAKFR

SEQ ID NO: 1321 - protein, 78 aa, Geobacillus sp.
QKTVLLPTIPPIVNPVVMRALTQARKVVNAIIKKYGSPVSIHIELARDLSQTFDERRKTKREQDENRKRNETAIRQLM

SEQ ID NO: 1322 - protein, 79 aa, Bacillus okhensis
KELLLPVIPNDITNPVVMRALTQARKVVNAIIKRLGEQPLSIHIELARDLLKGHDERRKISNEYKQNHKRNAGAYTILN

SEQ ID NO: 1323 - protein, 88 aa, Tistrella mobilis
HTAQVVSKAGFNALVTELGESIANPIARKALTEGLKQIRAMCARWGLPGAIHIELAREVGNSIEKRRELESQRETTTKRRQTERDEIR

SEQ ID NO: 1324 - protein, 80 aa, Kingella kingae
KTEKFLPNIPADKLRNPVVLRTLTQARKVINAIIRRYGSPARVHIETGREVGKSFSDRDKLKKQQEENQEQRRRAIDEWK

SEQ ID NO: 1325 - protein, 80 aa, Clostridium perfringens
VRTKKLPVIEIDEIVNPVVNRALAQTRKVINSVIDKYGSPVRINIELARDLAKNFKDRKLIEKEQKENRANLDKIRENLR

SEQ ID NO: 1326 - protein, 80 aa, Neisseria sp.
KNQMLLPQIPANEIRNPVVLRTLTQARKVINAIIRRYGSPQRVHIETARELGKSFKDRKEIEKRQEENRKERERAAEHFK

SEQ ID NO: 1327 - protein, 82 aa, Campylobacter coli
FDFLPAFCDSIFAQELTNPIVNRAISEYRKVLNALLKKYGKMHKIHIELARDIGLSKKLRAKIEKEQKENYENNIWALNECE

SEQ ID NO: 1328 - protein, 84 aa, Sulfurospirillum sp.
SHEKSILLPPLKETNIAILNPTVIRAFAQFRQVANALVSKYGSFDKVHFELAREVNTKEDRKRWEKDRDKNEKMHRQITEKLVE

SEQ ID NO: 1329 - protein, 96 aa, Dechloromonas denitrificans
GEGEHKYLPPLYDGRDGDGRMIFAEDADIPRNPVVLRSLNQARKVVNAIIRRYGSPSAVHIEMARDLSRPFDERNKIKKDQDEYQARNQRDREQFS

SEQ ID NO: 1330 - protein, 85 aa, Nitratifractor salsuginis
LRHLHLREGNLFEKEENPINNHAVKSLASWALGLIADLSWRYGPFDEIILETTRDALPEKIRKEIDKAMREREKALDKIIGKYKK

SEQ ID NO: 1331 - protein, 81 aa, Enterococcus cecorum
YSNIDKIDIKNVTENIYNPVVRKSIKKCLKIFNELYKKYPNISDVVIELPREDNPEDARKLIKKMQKENLVEKDTSLEAFR

SEQ ID NO: 1332 - protein, 83 aa, Facklamia hominis
YAEKNQIPVKELLEQIYNPTVTKSVHQSIKLFNEIIEKYGKNNISYVTIEMPRDKNDQDQKDTIKRINKLNSERKNDSEKYFL

SEQ ID NO: 1333 - protein, 80 aa, Streptococcus sinensis
KRTKYIDEKELTDEIYNPVVAKSVRQAIKIINLATKKYGVFDNIVIEMARENNEEDAKKDYVKRQKANEDEKNAAMEKAA

SEQ ID NO: 1334 - protein, 79 aa, Eubacterium dolichum
VKGMKNIQADDTAILSPVAKRAQRETFKVVNRLREIYGEFDSIVVEMAREKNSEEQRKAIRERQKFFEMRNKQVADIIG

SEQ ID NO: 1335 - protein, 81 aa, Streptococcus macedonicus
SKNIKTIDEKEITDEIYNPVVAKSVRQTIKIINAAVKKYGDFDKIVIEMPRDKNADDEKKFINKRNKENKKEKDDALKRAA

SEQ ID NO: 1336 - protein, 81 aa, Turicibacter sp.
FKGLKYIPLDAMVDEIYNPVVRCSIRESIKIINALLKKYGALDKVVIEMPRDSNEKEEKDRITKLNKENDNKKKQAIEKAR

SEQ ID NO: 1337 - protein, 79 aa, Bacillus niameyensis
LKTQTKVMFDGDAILSTVAKRAHREAIKIVNEVRKRYGEMDAIVIETAREKNSEEKRKQYSDFQREIGKHEKEMAKLLG

SEQ ID NO: 1338 - protein, 81 aa, Massilibacterium senegalense
LKGRNQIPVSIVDEWILSPVVKRAFTQSIRIVNAIIKRYGEPSEIVIELARERNSEDRKKFLSKLNRKNAAMNEEVKEKIE

SEQ ID NO: 1339 - protein, 55 aa, Kurthia huakuii
TKKIKYKDVQDLAGSPALKRGIWQAIKVVEELTEIFGEPQHIMLEVAREEGTKQR

SEQ ID NO: 1340 - protein, 56 aa, Streptococcus equinus
DVDDIEAVVHDLPGSPAIKKGILQSVKIVDELVKVMGHNPQNIVIEMARENQITGY

SEQ ID NO: 1341 - protein, 56 aa, Streptococcus equi
KTEYSKDLVGNLAGSPAIKKGISQTIKIVDELVKIMGYLPQQIVIEMARENQTTAQ

SEQ ID NO: 1342 - protein, 56 aa, Enterococcus faecium
DTENLEEIVKELTGSPAIKKGILQSLKIVDEIVGIMGYEPANIVVEMARENQTTGR

SEQ ID NO: 1343 - protein, 56 aa, Enterococcus italicus
EQQSAEEIVSELSGSPAIKKGILQSLKIVDELVAIMGYKPKNIVVEMARENQTTGR

SEQ ID NO: 1344 - protein, 56 aa, Streptococcus agalactiae
HSDNLKEVVGELAGSPAIKKGILQSLKIVDELVKVMGYEPEQIVVEMARENQTTNQ

SEQ ID NO: 1345 - protein, 56 aa, Streptococcus ratti
NSDDLHQVVQDLAGSPAIKKGILQSVKIVDELVKVMGYEPEQIVVEMARENQTTAK

SEQ ID NO: 1346 - protein, 56 aa, Listeria monocytogenes
ADKDIQSIVADLAGSPAIKKGILQSLKIVDELVSVMGYPPQTIVVEMARENQTTGK

SEQ ID NO: 1347 - protein, 56 aa, Lactobacillus sp.
KTDDIEDVINDAYTSPSNKKALRQVLRVVEDIKHAANGQDPSWLYIETADGTGTAG

SEQ ID NO: 1348 - protein, 55 aa, Pediococcus acidilactici
VWENIESILGDAYTSPQNKKAIRQVVKVVQDIEKAVGNPPEKIAIEFTREAAANP

SEQ ID NO: 1349 - protein, 56 aa, Acidaminococcus sp.
AQLSLNDFLDSMYISNAVKRPIYRTLAVVNDIRKACGTAPKRIFIEMARDGESKKK

SEQ ID NO: 1350 - protein, 57 aa, Lactobacillus sp.
QANGVEEILADAYTSPANKKAIRQVVKVVADVVKAAGGKKPAQFAIEFTREPDKNPK

SEQ ID NO: 1351 - protein, 56 aa, Treponema putidum
KRFSYNSLVKPLFLSPSVKKMLWQTLKLVKEISHITQAPPKKIFIEMAKGAELEPA

SEQ ID NO: 1352 - protein, 59 aa, unidentified
TEKPPLALLPPVCDTDLKRELRNPAVLRALSELRKVVNAVIREFGKPVSIHIELSRDLK

SEQ ID NO: 1353 - protein, 52 aa, unidentified
EKPEEIQLIPAGELRNPVVEQVINETLQIARDIWIKYGKPDEIHLEMAREMK

SEQ ID NO: 1354 - protein, 59 aa, unidentified
YEENLKQDLLPALDPKTNIRITNPTVLRTLSEARKVINAVIRKYGKLDRVNIELARDIK

SEQ ID NO: 1355 - protein, 57 aa, Eubacterium sp.
DQHSLRKAVDALYVSPKVKRPILRALLIAKEIEKIQERPPKKIFVEVARGIDNREER

SEQ ID NO: 1356 - protein, 55 aa, unidentified
SGEKKKDKLPSIPVDMIRNPVVLRALSQARKVVNAVINRYGSPYAIHIEFARDMG

SEQ ID NO: 1357 - protein, 76 aa, unidentified
HFTGERRERLPYYGEVLARHVIANPDAPEGSQERIGRVPNPTVHIALNQTAKLVNALIEAHGRPDEIVIELARELK

SEQ ID NO: 1358 - protein, 63 aa, unidentified
RPTGQISDRLPSPSDPDENRRLRSIRNPTVVRCQNELRKVVNNLIDVYGKPDIIRVELARDVG

SEQ ID NO: 1359 - protein, 47 aa, Bifidobacterium bombi
PIYEHTGNPSVDRTFSIIHRWLCNMRDQYGEPETVNIEYVRDGFSST

SEQ ID NO: 1360 - protein, 58 aa, unidentified
FKGDKSTLLPPLSEQENLEMTNPVVKRAIAQMRLVYNAITRKYGAIDAVHVEFTRDIK

SEQ ID NO: 1361 - protein, 47 aa, Corynebacterium camporealensis
RIGEPVGNPAVDRVLKATARWLEAAHKEWGAPKSIIIEHVRDGFISE

SEQ ID NO: 1362 - protein, 25 aa, unidentified
KQNHEQRKEESKRQAENQDRNKRLR

SEQ ID NO: 1363 - protein, 57 aa, unidentified
EKSDPIEKLPSDPRQFEDLRNPTVKRALTELRKVVNNLLATYGKPERIRIELARNVA

SEQ ID NO: 1364 - protein, 59 aa, Legionella pneumophila
PFDGVLARMMQRLAYEIAMAKWEQIKHIPDNSSLLIPIYLEQNRFEFEESFKKIKGSSS

SEQ ID NO: 1365 - protein, 51 aa, unidentified
QLNKPLLGEPPYVRNPVAQKALYQVRRVVNAVIRRYGKPAQIIVELAREMK

SEQ ID NO: 1366 - protein, 67 aa, unidentified
EKRELKTRLEILPKNSLRNPVVEKILNQMINVVNTIIDTENDKLEQDGKIRNFQFDEIRIELARELK

SEQ ID NO: 1367 - protein, 60 aa, unidentified
NERKLLNRLPYGMEADRQIQQLRNPIVIQALFELRKVINELLERFGPFDEIKIELGRDLK

SEQ ID NO: 1368 - protein, 62 aa, Acidaminococcus intestini
TKLQEAYYAKAQLSLNDFLDSMYISNAVKRPIYRTLAVVNDIRKACGTAPKRIFIEMARDGE

SEQ ID NO: 1369 - protein, 60 aa, Coriobacterium glomerans
DDFNRAFFAENAQALGVNELPGSPAVRRSLNQSIRIVDEIASIAGKAPANIFIEVTRDED

SEQ ID NO: 1370 - protein, 59 aa, Eggerthella sp.
EEENTQSMLEGENLLIEDLPGSPAIRRSINQAVRIVDEIVGIAGHAPDNIFIEVTREDD

SEQ ID NO: 1371 - protein, 60 aa, Finegoldia magna
DKLRKKYIPQEISYEVVENLYVSPSVKKMIWQVIRVTEEITKVMGYDPDKIFIEMAKSEE

SEQ ID NO: 1372 - protein, 62 aa, Lactobacillus rhamnosus
MAELNQDKLKADDIEDVINDAYTSPSNKKALRQVLRVVEDIKHAANGQDPSWLYIETADGPG

SEQ ID NO: 1373 - protein, 59 aa, Mycoplasma gallisepticum
SLKQDKRYLDDRFINDAILSPGVKRILREATKVFNAILKQFSEEYDVTKVVIELARELS

SEQ ID NO: 1374 - protein, 59 aa, Streptococcus agalactiae
DKARTGSHSDNLKEVVGELAGSPAIKKGILQSLKIVDELVKVMGYEPEQIVVEMARENQ

SEQ ID NO: 1375 - protein, 59 aa, Streptococcus dysgalactiae
QKAQVSGQGHSLHEQIANLAGSPAIKKGILQSVKVVDELVKVMGHKPENIVIEMARENQ

SEQ ID NO: 1376 - protein, 59 aa, Streptococcus gallolyticus
KDAQIIGDIDDVTSVVRELPGSPAIKKGILQSVKIVDELVKVMGHNPDNIVIEMARENQ

SEQ ID NO: 1377 - protein, 55 aa, Streptococcus gordonii
TSKRTKYIDEKELTEEIYNPVVAKSVRQAIKIINEATKKYGIFDNIVIEMARENN

SEQ ID NO: 1378 - protein, 59 aa, Streptococcus mutans
AKAQVIGETDNLNQVVSDIAGSPAIKKGILQSLKIVDELVKIMGHQPENIVVEMARENQ

SEQ ID NO: 1379 - protein, 55 aa, Streptococcus salivarius
SSNKTKYIDEKQLTEEIYNPVAAKSVRQAIKIVNAAIKEYGDFDNIVIEMARETN

SEQ ID NO: 1380 - protein, 55 aa, Streptococcus suis
VAEYPSSINVDEITDEIYNPVVAKSIRQTIKIINASIKKWDEFDQIVIEMPRDRN

SEQ ID NO: 1381 - protein, 55 aa, Streptococcus thermophilus
SSNKTKYIDEKLLTEEIYNPVVAKSVRQAIKIVNAAIKEYGDFDNIVIEMARETN

SEQ ID NO: 1382 - protein, 63 aa, Treponema denticola
KKINSGFEDAEKQFSYDGLVKPLFLSPSVKKMLWQTLKLVKEISHITQAPPKKIFIEMAKGAE

SEQ ID NO: 1383 - protein, 59 aa, Lactobacillus animalis
KNAQVIEKEETLAKTVQELPGSPAIKKGILQSLEIVDEIIKVMGYKPKSIVVEMARETQ

SEQ ID NO: 1384 - protein, 63 aa, Lactobacillus ceti
QEYNKEYYGDFTFKAEPSIMDDLYVGPGPKRAIWQAVRIVEEIKRIMGHDPEKIFLETTRTNR

SEQ ID NO: 1385 - protein, 61 aa, Tissierellia bacterium
DEINGEDDFSNIDIKEYVDKLYVSPSVKRSIIQTYKIAMEIKKITKKDPKKIFIEMAKDKG

SEQ ID NO: 1386 - protein, 62 aa, Veillonella parvula
QEINAKLTEGQIVNPHDIIDDLALSPAVKRAVWQALRIVDEVAHIKKALPARIFVEVTRSNK

SEQ ID NO: 1387 - protein, 53 aa, unidentified
EEKEMSDKLSEIENLRNPIVQRAIQEMRRMINELIEKYGKFDRIAVEMGREMK

SEQ ID NO: 1388 - protein, 59 aa, Enterococcus faecalis
QKAQSSEHEETLSETVNELAGSPAIKKGIYQSLKIVDELVAIMGYAPKRIVVEMARENQ

SEQ ID NO: 1389 - protein, 55 aa, Streptococcus gallolyticus
NVINKVIEKYGIPEDIIIELARENNSDDRKKFINNLQKKNEATRKRINEIIGQTG

SEQ ID NO: 1390 - protein, 55 aa, Staphylococcus pasteuri
MNELIPELYATSDEQMTILTRLEKFKVNKKSSKNTKTIDEKEVTDEIYNPVVAKS

SEQ ID NO: 1391 - protein, 201 aa, Prevotella histicola
TQYIAKKAYEILSDLVRNVTPTTGAVTSRLREDWQLVDVMKELNFEKYQKLGLVEVIEDRDGRKIKRIKDWTKRNDHRHHAMDALTIAFTKPSYIQYLNNLNARSDKNSSIYGIENKELHREDNKLRFNAPLPINEFRAEARRHLKSILVSVKAKNKVMTQNVNVIKTKHGVIKKVQLTPRGELHNATFYGTKKRPIIKMV

SEQ ID NO: 1392 - protein, 148 aa, Chryseobacterium gallinarum
TQYIAKKAKEILFEITNSVVTTSGRITDKLRKDWDLVNIMKELNLDNYRRLGLTEIVRNSKGEEKELIPDWTKRNDHRHHAMDALTVAFTTRNHIQYLNYLNARKDEKHKEHQNIYAIENIITEVIEKKNGSKTRRFKAPMNSFRHEA

SEQ ID NO: 1393 - protein, 201 aa, Parabacteroides sp.
TQYIAKKALAMLNEICRRVVATTGSITDQLREDWQLVDVMKELNLPKYEALGFVETYEDKDGRKIKRIKDWTKRNDHRHHAMDALTVAFTKDAFIQYFNNKNAAQDSGNRNHTNIIGIKTRYFDKGRALPPIPLEQFRIEAKQHLEKLLVSIKAKNKVVTVNVNRTKKRKGENTKIQQTPRGQLHLETVYGSHKQYVTKIE

SEQ ID NO: 1394 - protein, 206 aa, Capnocytophaga canis
TQYIAKKAKEILLQITRNVLSTSGGITDRLREDWDLVNVMKELNLPKYRALGLTEMEDRKYGQQVEVIIDWTKRNDHRHHAMDALTVAFTKHNHIQYLNYLNARKNEKHKEHSNIMGIQQLETIKVTDKNGNEKRVFKAPMPNFRQVAKAFLENVLISHKAKNKVVTKNKNKVAGSNKVQEVLTPRGQLHKETVYGKYQYYVQKEE

SEQ ID NO: 1395 - protein, 228 aa, Ornithobacterium rhinotracheale
TKYISKLVLSLLSNIVREKGELESTAKRIVSTNGQITSILRNDWGLNNIWNKLITPRFERLNNINKNKIYGNWENKKGKNVFQINYLNDNLSTLNTKRIDHRHHALDALIVACTTRNHINFLNNQYAKSRNQRHDLRAKLKRRETITTEGSKKQVFKDFIKPWESFTQDALKKLETTIVNFKVNKRIINKTINWYKKWEKQKDGTYKKIQKKQTKGDAWAIRKPLHID

SEQ ID NO: 1396 - protein, 222 aa, Weeksella virosa
TRYISKYISKVLSNLVRGEKDDEGVNSKNIIPGNGKITGILKQDWGLNDVWNDLILPRFERMNQLTNSTDFTAWNEKHQKFLPSVPLELSKGFQKKRIDHRHHALDALIIACATRDHVNLLNNKHAKSRNERYDLQHKLRHTTPWQDKEGKVRTKFTEFKKPWETFTQDTKKELEKIVVNFKQNLRVINKATNYYEKIVDGKKVMFKQEGVNWAIRKPMHKE

SEQ ID NO: 1397 - protein, 198 aa, Flavobacterium frigidarium
TQYIAKKAKEILFEVSRNVTATIGSVTDKLRDDWELVEVMKELNWKKYEKLGLTYEEKGKNGERLYKIKDWTKRNDHRHHAMDAITVAFTKPAYIKYLNTLNAQSKDDTKEIYSQYLKRDKNNKLRFIPPMENFREAAKKQLESILISYKAKNKVVTKNKNTTKKSGGTQTKIQLTPRGQLHKETVYGKLQRYETKEE

SEQ ID NO: 1398 - protein, 171 aa, Rikenellaceae sp.
RHYWRMHLDYWRRKCEAFTMTEVPEGFSNRQGVDVGIIGRYARLYLQTVFDRVYTVKGATTAAFRRMWGLQEEYAAKERVNHVHHCIDAITIACIGSREYALWAQYVRQDELYRWGEADKPRCGKPWPTFTEDVRATADELLISHHTPDNMPKQSRKRLRVRGKVQRNDRG

SEQ ID NO: 1399 - protein, 167 aa, Jejuia pallidilutea
TQMISRYAREYLKLYFKKVSVQKGTVTSDFRKLFGFQEEDEIKSRDKHTHHAIDASVLTLIPVNSSKREQILKNYFKSQEDKDKLSLKKLRASVKPSSDFNPQELIRKIEEKTLIVNYQKDKIINQSIKKVRKRGKIQYVKDKQGEFVLDKEGNRIIKYAKGDTLRS

SEQ ID NO: 1400 - protein, 156 aa, Caenispirillum salinarum
HDTARATRLARLYLAAAVMPEDPAEIGAPPVETPPSPEDPTGYTAIYRTISRVQPVNGSVTHMLRQRLLQRDKNRDYQTHHAEDACLLLLAGPAVVQAFNTEAAQHGADAPDDRPVDLMPTSDAYHQQRRARALGRVPLATVDAALADIVMPESDR

SEQ ID NO: 1401 - protein, 457 aa, Salinispora pacifica
YEPEAFLQRQLNDTRYISKAARDYLSTICDQVYVFPGSLTAKVRRMWGLNSILSPPIKTNFEGNAGMYWAVMNDDGVIIELSEQELPPPAIRASDILISGEMKNGIFKVDRKFTGQSQTREVSVEHRTYDSPGWMVYSLLSVEKYLPLFSKLPSQDTKSIWLKGRAQVKDRESPSLMLNSLPVKLMLPPGEYDDNAPYWVNIPVNGELRWEKRGEKPGKNELLIKRTKHRDGKVEAFIDKRKCLFDIPPQDNKSALIIPLDLQEILQVVRMFTPTPAIAEHQFLIKGKIDQSYRFTAESNFRIALDAPEGTPSGPAFAIANCEPRDMRFYPKKNIKPKNGKGKNVLSGFVFQEDGSLVFNPGKNRMDHRHHAIDALTIALLNTGQLRELSGYFLKIKKRQRYSAPKPQFPLPWDNFRADALNSINSILVVHRQNREIIKRIKKNTRLNGRTYVSQGM

SEQ ID NO: 1402 - protein, 143 aa, Sulfitobacter donghicola
DFTARALKDTQYLSRLARTYLDALYDGGDDKSHVWVVPGRLTEMLRRHWGLNGLEALADSDEKTVKRKNRTDHRHHAIDAAVVAATDRSLIQKISKIAASDEQAGAEDTLKSTPPPWDSFRDDIAAQLQNITVSHRADHGRTD

SEQ ID NO: 1403 - protein, 133 aa, Mucispirillum schaedleri
DFIARQLSDTQYLSTRALIYLQSLYEKAHHSSIWTIPGQLTALIRNYLGLNTLISNDKNKNRNDHRHHAVDAFVVAVTSRSLLQKISYAASLQEDLDNRNVSSYRNKLLEKMPEPFPNYRKSLELAIDNIKTS

SEQ ID NO: 1404 - protein, 144 aa, Mesorhizobium sp.
GFQARHLNETKHMSRLAKAYLGKICDPDAVYVTPGALTSLLRGKWGLNSILSDDNLKDRTDHRHHAIDAITIGAMTRSLLLELNTLAGKAEQSDYDDVVGKVPWPFDNFRDAVRSVVDRVVVSNKPEHGKQGALHEDTAYGIVG

SEQ ID NO: 1405 - protein, 171 aa, Neisseria meningitidis
GFKECNLNDTRYVNRFLCQFVADHILLTGKGKRRVFASNGQITNLLRGFWGLRKVRAENDRHHALDAVVVACSTVAMQQKITRFVRYKEMNAFDGKTIDKETGKVLHQKTHFPQPWEFFAQEVMIRVFGKPDGKPEFEEADTPEKLRTLLAEKLSSRPEAVHEYVTPLFVS

SEQ ID NO: 1406 - protein, 148 aa, Geobacillus sp.
EFKSRNLNDTRYISRFFANFIREHLKFAESDDKQKVYTVNGRVTSHLRSRWDFNKNREESDLHHAVDAAIVACTTPSDIAKVTAFYQRREQNKELAKKTEPQFPQPWPHFADELRARLSKHPKESIKALNLGNYDDQKLESLQPVFVS

SEQ ID NO: 1407 - protein, 144 aa, Bacillus okhensis
VMKERHLNDTRYASRYFKQFVEKSLQFKKSKNQFHKKRVETVAGRVTAHFRQRWGFEKHREGTHLHHALDAIVVACTDAAMIQALSLYHKQKEEGKKGYIKRFPLPWITFRDDVLNKLSESAIPEQIYSALVSGTTLPSYMLVS

SEQ ID NO: 1408 - protein, 157 aa, Tistrella mobilis
RFRSRNLNDTRYAARLLAEAAKLFYPAGDRQEKDGRRRVLTRPGPLTAALRHAWGLESLKKADGKRVSDDRHHALDALAVAAISEREVQRLTRSFQEWEQQGLARPLRHVAPPWPGFRGDVLAAYAQAFVARPERRRARGKGHDASIRQVVGEGPEA

SEQ ID NO: 1409 - protein, 155 aa, Kingella kingae
GFLERNLNDTRYVSRFLCQFISEHLHLTGKGKKRVFASNGQITALLRGRWGLSKNREENDRHHAVDAVVVACSTVAMQQKITQFVRYQKGNVFTGERIDKETGEVISIHFPTPWEHFREEVMIRVFDDNPLRTLPEKLPNRPEALHEYVMPLFVS

SEQ ID NO: 1410 - protein, 168 aa, Clostridium perfringens
DWKARNLQDTKYICRYISNFVNNRLEFKESENKQKVITVNGRATAYLRSRWGLNKVREDGDKHHALDAAVVGVTTQGMVQKISKYSKAHELYTVRKNDEFVDVETGECVDVDEYKEIRKDILPRPWRGFSEELKLRLSDNPLEELKKSPIETYNEEFIKENVKPIFVS

SEQ ID NO: 1411 - protein, 150 aa, Neisseria sp.
GFLERNLNDTRYIARFLCGFIEKSLHLQGAGKRRVFASNGQITALLRGLWGLKKVREDNDRHHALDAIVVACSTVSMQQKITKAMQRRETLETINTETGEVKTRIPQPWDFFRQEVMIRVFSDAPREELAEKLNSRPEALHDFVSPLFVS

SEQ ID NO: 1412 - protein, 146 aa, Campylobacter coli
DFISRNLNDTRYISTLIVKYTKEYLDFLPLDEKEDINLKSGEKGSKIHVQTINGMLTSVLRHTWGFAQKDRNNHLHHALDATIVAYSTNAIIKAFSDFKKEQELLKAKLYAKELTNDSYKHQAKFFEPFEGFREQILNQINKLFVS

SEQ ID NO: 1413 - protein, 139 aa, Sulfurospirillum sp.
EFISRNLNDTRYMSKAIKTYCENHWKLSHDDDKLRIQVRSGKLTSTLRHQWGLDNKNRETHTHHAMDAIMIAFSTQGMVKKLSDYFAKKEAKVEKDKPVLITPIKQFKEAVEQATTLERQESIQTKAGDTITLNRLLIS

SEQ ID NO: 1414 - protein, 166 aa, Dechloromonas denitrificans
EFRERNLNDTRYVCRFFKNYVEQHLKLAEGSETKRCVVVSGQLTNFLRARWGLLKVRSDSDRHHALDAAVVAACSHSMVQRLSNYSRTRELEQVRDGFVDIETGEIVNPAMHQQLREHFPDPWPYFRHELEARLKIDSPELLREEMARLGSYSEEELKVLKPLFVS

SEQ ID NO: 1415 - protein, 147 aa, Nitratifractor salsuginis
NTHSKGIRATSYLEALVAQVLKRYYPFPDPELRKNGIGVRMIPGKVTSKTRSLLGIKSKSRETNFHHAEDALILSTLTRGWQNRLHRMLRDNYGKSEAELKELWKKYMPHIEGLTLADYIDEAFRRFMSKGEESLFYRDMFDTIRSI

SEQ ID NO: 1416 - protein, 141 aa, Enterococcus cecorum
KFIARNLVDTRYASRVVFNELTQFFASKKADTKVAVIRGKFTSQLRRAWQLNKSRDTYHHHAVDAALIGVTPFLKIWRSGKTIYPRKMTEAQTDFELNEITTNDEFKESYYQLPCPQFLDYLTQMQENLKINFEVDKKMNR

SEQ ID NO: 1417 - protein, 149 aa, Facklamia hominis
GFVSRNLNDTRYASRIVLNAIQSFFYKQKDLTKVKVVNGSFTHTLRKKWGSSLDKNRDTYHHHAVDATLCAVTPFINIVKYEFFEEDGIKYMVDLTTGEKVAYSDYKKMKFYDKRAYVPIWDGFIKQLTPANLYPKIKFSHQVDSKWNR

SEQ ID NO: 1418 - protein, 145 aa, Streptococcus sinensis
KFIERNLVDTRYSSRVVLNALQDFYKLNDFDTKISVVRGQFTSQLRRKWRIDKSRETYHHHAVDALIIAASSQLRLWKKQGNPLISYKENQFVDSETGEIISLTDDEYKELVFRAPYDHFVDTVSSKKFEDRILFSYQVDSKYNR

SEQ ID NO: 1419 - protein, 137 aa, Eubacterium dolichum
EFINRNLVDTSYASRVVLNTLTTYFKQNEIPTKVFTVKGSLTNAFRRKINLKKDRDEDYGHHAIDALIIASMPKMRLLSTIFSRYKIEDIYDESTGEVFSSGDDSMYYDDRYFAFIASLKAIKVRKFSHKIDTKPNR

SEQ ID NO: 1420 - protein, 146 aa, Streptococcus macedonicus
KFIERNLVDTRYASRVVLNSLQSALRELGKDTKVSVVRGQFTSQLRRKWKIDKSRETYHHHAVDALIIAASSQLKLWEKQDNPMFVDYGNNQVVDKQTGEILSVSDNEYKELVFQPPYQGFVNTISSKGFEDEILFSYQVDSKYNR

SEQ ID NO: 1421 - protein, 139 aa, Turicibacter sp.
RFINRNLVDTRYASKVVLNTLQDFMKENYPTTTVEVVRGKFTAQLRRHWGIRKNRDENHAHHAIDALIIACVPHLSLWKEQKKVFSTDEFRVDETTGEIIEQSYNQLTYQEPFSQFFYQLEKVSIDCRYSYKVDRKFNR

SEQ ID NO: 1422 - protein, 137 aa, Bacillus niameyensis
EFINRNLVDTQYAMRSFSMSLRTFFNSHNIDTKVLSIRGSFTAAFRRRARLNKDREESHAHHAIDALIVAAIGRMPIFEFLKEFDMSEEGVVVNRETGEILEENEFFKHKYLSFIRNLMNYESKVKYSHKVDRKVNR

SEQ ID NO: 1423 - protein, 144 aa, Massilibacterium senegalense
EVQKEFINRNLVDTRYVTRELMNLLKTFFSENNKNVKIKSINGSFTHYLRKLWRFKKDRNIDYKHHAEDALIIAMAGYLFSKKEVLAKQNLILSDPHIVNKETGEILSEDDFTKTFIDKYEKVATIKKYQNYKYSHRVDQKPNR

SEQ ID NO: 1424 - protein, 140 aa, Kurthia huakuii
TRQIIKNVGVLLEERFSETTVHLVKAPIVSKFRKALELPKLRNLNNKHHAMDALLNALLINHAIQQYGENIFAFSFKDKERSSKLAKAAQQKNGFFLFNSFLSEQIKGPRSRKTLSAIAYVEEIYYELPWQTTKKIGNSD

SEQ ID NO: 1425 - protein, 182 aa, Streptococcus equinus
TRQITKHVAQILDARFNTKRDENDKVIRDVKVITLKSSLVSQFRKEFKFYKVREINDYHHAHDAYLNAVVGTALLKKYPKLAPEFVYGEYKKYDVRKLVAKSSDNHSELGKATAKYFFYSNLMNFFKTEVKYADGRVFERPDIETNADGEVVWNKQRDFDIVRKVLSYPQVNIVKKVEEQTV

SEQ ID NO: 1426 - protein, 161 aa, Streptococcus equi
TRQITKHVAQILDSRFNTEFDDHNKRIRKVHIITLKSKLVSDFRKEFGLYKIRDINHYHHAHDAYLNAVVAKAILGKYPQLAPEFVYGDYPKYNSFKERQKATQKMLFYSNILKFFKDQESLHVNSDGEEIWNANKHLPIIKNVLSIPQVNIVKKTEVQTG

SEQ ID NO: 1427 - protein, 158 aa, Enterococcus faecium
TRQITKHVAGILHHRFNKAEDTNEPIRKVRIITLKSALVSQFRNRFGIYKVREINEYHHAHDAYLNGVVALALLKKYPQLAPEFVYGEYLKFNAHKANKATVKKEFYSNIMKFFESDTPVCDENGEIFWDKSKSIAQVKKVINHHHMNIVKKTEIQKG

SEQ ID NO: 1428 - protein, 154 aa, Enterococcus italicus
TRQITKHVATILDSKFNEDSNNRDVQIITLKSALVSEFRKTFNLYKVREINDLHHAHDAYLNAVVALSLLRVYPQLKPEFVYGEYGKNSIHDQNKATIKKQFYSNITRYFASKDYIINDDGEILWNKQETIAQVIKTLGMHQVNVVKKVEIQKG

SEQ ID NO: 1429 - protein, 136 aa, Streptococcus agalactiae
TRQITKHVARILDERFNNELDSKGRRIRKVKIVTLKSNLVSNFRKEFGFYKIREVNNYHHAHDAYLNAVVAKAILTKYPQLEPEFVYGDYPKYNSYKTRKSATEKLFFYSNIMNFFKTKVTLADGTVVVKDDIEVN

SEQ ID NO: 1430 - protein, 173 aa, Streptococcus ratti
TRQITKHVARILDEHFNKEFDEDKKRIRKVKVVTLKSNLVSNFRKEFELYKVREINDYHHAHDAYLNAVVAKALLMKYPKLEPEFVYGEYPKYNSYRERKTATQRMFFYSNIMNMFKSKVKLADERIIERPMIEVNDETGEIAWDKTKHIATVKKVLSYPQINIVKKVEEQTG

SEQ ID NO: 1431 - protein, 158 aa, Listeria monocytogenes
TRQITKNVANILHQRFNYEKDDHGNTMKQVRIVTLKSALVSQFRKQFQLYKVRDINDYHHAHDAYLNGVVANTLLKVYPQLEPEFVYGDYHQFDWFKANKATAKKQFYTNIMLFFAQKDRIIDENGEILWDKKYLDTVKKVMSYRQMNIVKKTEIQKG

SEQ ID NO: 1432 - protein, 142 aa, Lactobacillus sp.
TRQIIKLTEQIAAAQYPNTKIIAVKAGLSHQLREELDFPKNRDVNHYHHAFDAFLAARIGTYLLKRYPKLAPFFTYGEFAKVDVKKFREFNFIGALTHAKKNIIAKDTGEIVWDKERDIQELDRIYNFKRMLITHEVHFETA

SEQ ID NO: 1433 - protein, 150 aa, Pediococcus acidilactici
TSQVIKLTANILNGIYDKDTEIIEVPAKMNSQMRKMFDLVKVREVNDYHHAFDAYLTIFIGKYLYKCYPKLRPYFVYGKFKKFGDNEDIEVGDGRFNFLNRIERLKNVTDPETGEILWSNVAPNETIKQIKKVYNYKFMLVSRETTTRRA

SEQ ID NO: 1434 - protein, 129 aa, Acidaminococcus sp.
TRQSTKALAILLKRKFPDTEIVYSKAGLSSDFRHEFGLVKSRNINDLHHAKDAFLAIVTGNVYHERFNRRWFMVNQPYSVKTKTLFTHSIKNGNFVAWNGEEDLGRIVKMLKQNKNTIHFTRFSFDRKE

SEQ ID NO: 1435 - protein, 159 aa, Lactobacillus sp.
TSQIVKLVSVILQNKYPDSEIITVKAGDNSALRQRLNLYKSREVNDYHHAIDAYLSIICGNFLYQVYPKYRPYFVYGKYKKFSQDPDLQKEVIKHFKGFTFMWPLLQKDNSERKAPEKIKENNSDRIVFYKHPDIFDKLRKAYNYKYMLVSRETNTENS

SEQ ID NO: 1436 - protein, 135 aa, Treponema putidum
TRQATKVAAKVLEKIFPETNIVYSKAETVSMFRNKFDIIKCREINDFHHAHDAYLNIVVGNVYNTKFTNNPWNFIKEKRDNPKIGDTYNYYKVFDYDVKRNNITAWEKEKTIITVKTMLKRNTPIYTRQAACKKG

SEQ ID NO: 1437 - protein, 113 aa, unidentified
AARYLGLLYGIQGSDNRRIIVCAGAVTAYLRQEWDLNRILSAQPVKSREDHRHHAVDALAVALATPAQIKALAECASRAPQVGRRRFAPLPDPWPGFRDQARRAILGTLVSHR

SEQ ID NO: 1438 - protein, 144 aa, unidentified
YITRRVKEELEKISPVVTTVGSITDYLKEDWKLNKVFKEVQLGRFRSIEKKIDKKLIQEIRINGYHDYQIEGWDKRIDHRHHALDAITIACTNRSIIQTLNNLAQLYESSEPIKNKISRHFPVPAPDFRDQVKNTLETMIVSHK

SEQ ID NO: 1439 - protein, 114 aa, unidentified
YASRTLKKYLETYLKIGEDDNKVKVLAVNGYLTAELRHQWGLEKDRDANDIHHAVDAVVIALANAGIVKKLANYYKEREYRKHPKFTEPLENFRKVLNEKLVNLPVNRLLVSRP

SEQ ID NO: 1440 - protein, 133 aa, Eubacterium sp.
TQQSTKAVAHILEQLYPKPKTEIVYVKAALVHAFRQSNDMLKCREVNDLHHAKDAYLNIVVGNAYNVKVTHNKVNFIKGLQNNDKGYTVNPEKFFSHDIPGAWSVKDSMNTVRRFMNKNNIRYTRFPRKKQGG

SEQ ID NO: 1441 - protein, 126 aa, unidentified
YVAREFAGFIRANLLFADPDNKLPLVCINGQVVAQARWLWGLYKDRDENDLHHAQDAAVIAALLPYQIKMITEYSKVVETRRNHIDPETGEIIEWKENERPRLPEPWKGFRKEGVEKLGSILVSRM

SEQ ID NO: 1442 - protein, 127 aa, unidentified
HMARLAKTYLGTLYGEDAAKRVWSTPGRLTAMLRGMWGLNGLLKDHNRAGADGADVKNRDDHRHHFLDAFVVACTDRGTLQRVATASARAEAMEIDRWAEKGAFPEPFEGYREQISDRIGTMVVSHK

SEQ ID NO: 1443 - protein, 118 aa, unidentified
YAARESVNMLKQLWPQGGANMPVTVQVVSGRVTAQLRRLWGLNNLLHDGAEKTRADHRHHAVDALVVASCNPGITQSLSRYWKLRESPSAETHPIPLPWPEIRQDATQALDKVIVSHR

SEQ ID NO: 1444 - protein, 183 aa, Bifidobacterium bombi
DNRSMESVSYMARELRNRIYGFYGWHDQDDALKQGRQRVFVSSGSMTAAARRTPFESPLIKGADEETYESSLPWLDGMKGKTRLDRRHHAVDASIIAMMRPQIVKILTEAQEIRSEQHDKYRKGQTPDYVCKRRDYWRNWRGTPDTRDEEVFNYWAGEQLRTLTDLVSQKMADDEIPVIYPTR

SEQ ID NO: 1445 - protein, 118 aa, unidentified
YISKFVKNYIESHVEFKESKMKRHVYTMNGMLTSQLRYKWGVGDKNRENHLHHAEDAIILAFATQAQVQKLSTTSAKREGFSFKNKEEKAKELRFEPPMENFNEKVKESIENIFVSHM

SEQ ID NO: 1446 - protein, 148 aa, Corynebacterium camporealensis
DNRSIESVAWMANELRSRVAQHFGEYGTKVGVYRGELTAEARNAAGIRRKLRFIDGTGKSRLDRRHHAVDAAVICFTQNYVAEVLAKRSSMRRAAQLNREPEQWREFTGSTDAHRAAWNAWVNKMHLLANLLQTALDEDRIVVTSNLR

SEQ ID NO: 1447 - protein, 113 aa, unidentified
HLSKVAREYLTLICPQATRVIPGRMTAMLRGKFGLNDVLGLNGEKNRNDHRHHAVDACVIAVTDQGLLQRFAKASASAREKQLNRLVESMPLPWENYREHVQRAVGNILVSHK

SEQ ID NO: 1448 - protein, 115 aa, unidentified
YIAREARAWLGQLMPRGIFDVEPRNGRIVSRLRKLWHLDRLLGEDGRKNRDDHRHHALDAAVTALFDTRAMQDIVRWYKAQEDRPEEKPPAIDLPWPAFRDDLRTALEAIVVSHR

SEQ ID NO: 1449 - protein, 112 aa, Legionella pneumophila
ARVNGTQKFLGKQIMEFLSTLADSKQLQLEFSIKQITAEEVHDHRELLSKQEPKLVKSRQQSFPSHAIDATLTMSIGLKEFPQFSQELDNSWFINHLMPDEVHLNPVRSKEK

SEQ ID NO: 1450 - protein, 112 aa, unidentified
LICRETLGYLKELGVEVCVSRGALTADLRHHWGLNALLSSSEDEKERRDHRHHAVDALVIALTTRRLLQTLSELSSKQGSRSLKDRLRVGLPWPSFREDAKLAIEKIVVSHA

SEQ ID NO: 1451 - protein, 158 aa, unidentified
YIAKKAKEILFQITKSVVSTSGSITDRLRQDWGLIDVMKELNLPKYEKAGLVEIQHDKNGQPKKVIKNWTKRNDHRHHAMDALTVAFTKHSHIQYLNNLNARKNEDSEKKANIYAIEEKETVKINDGKGNSKRIFKEPILNFRDEAKKHLECVLVSHK

SEQ ID NO: 1452 - protein, 111 aa, unidentified
YISREAAEYLRQICPKVWVASGQLTARLRHLWGLNSIIDDKSNQKDRSDHRHHAIDALVVAVHTHRDLQLMSRLNRHGISPDSLADAFPFPWPGFRSDAETYVSNILVSHK

SEQ ID NO: 1453 - protein, 121 aa, Acidaminococcus intestini
QSTKALAILLKRKFPDTEIVYSKAGLSSDFRHEFGLVKSRNINDLHHAKDAFLAIVTGNVYHERFNRRWFMVNQPYSVKTKTLFTHSIKNGNFVAWNGEEDLGRIVKMLKQNKNTIHFTRF

SEQ ID NO: 1454 - protein, 138 aa, Coriobacterium glomerans
LEARYPETNIISVKASISHDLRTAAELVKCREANDFHHAHDAFLACRVGLFIQKRHPCVYENPIGLSQVVRNYVRQQADIFKRCRTIPGSSGFIVNSFMTSGFDKETGEIFKDDWDAEAEVEGIRRSLNFRQCFISRM

SEQ ID NO: 1455 - protein, 150 aa, Eggerthella sp.
QSVKLTQMMLSQKYPGAKVRPIKASISSQLRDACDLVKCREANDYHHAHDAYLACQVGRFVLKRHSSMFDNPIGMTKVIRDFVKRQGQEFKRNGKLPAYASRSGFIVQSFMRSGFDAETGELLRDDWNAPFEIARIKRCLNYRDCYISRM

SEQ ID NO: 1456 - protein, 125 aa, Finegoldia magna
QSTKAIKELFEKFYQKSKIIPVKASLASDLRKDMNTLKSREVNDLHHAHDAFLNIVAGDVWNREFTSNPINYVKENREGDKVKYSLSKDFTRPRKSKGKVIWTPEKGRKLIVDTLNKPSVLISNE

SEQ ID NO: 1457 - protein, 134 aa, Lactobacillus rhamnosus
QIIKLTEQIAAAQYPNTKIIAVKAGLSHQLREELDFPKNRDVNHYHHAFDAFLAARIGTYLLKRYPKLAPFFTYGEFAKVDVKKFREFNFIGALTHAKKNIVAKDTGEIVWDKERDIQELDRIYNFKRMLITHE

SEQ ID NO: 1458 - protein, 147 aa, Mycoplasma gallisepticum
YATIVFRDALKDYANNHLVEDKPMFKVVCINGGVTSFLRKNFDKSWYAKKDRDKNIHHAVDASIISIFSNETKTLFNQLTQFADYKLFKNTDGSWKKIDPKTGVVTEVTDENWKQIRVRNQVSEIAKVINKCIQDSNIERKARYSRK

SEQ ID NO: 1459 - protein, 172 aa, Streptococcus agalactiae
QITKHVARILDERFNNEVDNGKKICKVKIVTLKSNLVSNFRKEFGFYKIREVNDYHHAHDAYLNAVVAKAILTKYPQLEPEFVYGMYRQKKLSKIVHEDKEEKYSEATRKMFFYSNLMNMFKRVVRLADGSIVVRPVIETGRYMRKTAWDKKKHFATVRKVLSYPQNNIVKK

SEQ ID NO: 1460 - protein, 172 aa, Streptococcus dysgalactiae
QITKHVAQILDSRMNTKYDENDKLIREVKVITLKSKLVSDFRKDFQFYKVREINNYHHAHDAYLNAVVGTALIKKYPKLESEFVYGDYKVYDVRKMIAKSEQEIGKATAKRFFYSNIMNFFKTEITLANGEIRKRPLIETNEETGEIVWDKGRDFATVRKVLSMPQVNIVKK

SEQ ID NO: 1461 - protein, 169 aa, Streptococcus gallolyticus
QITKHVAQILDSRFNTERDENDKVIRNVKVITLKSNLVSQFRKDFKFYKVREINDYHHAHDAYLNAVVGTALLKKYPKLAPEFVYGEYKKYDIRKFITSSGDKATAKYFFYSNLMNFFKRVIRYSNGKVVVRPVIECSKDTGEIAWNKQTDFEKVRRVLSYPQVNIVKK

SEQ ID NO: 1462 - protein, 127 aa, Streptococcus gordonii
YSSRVVLNALQDFYKSHQLDTTISVVRGQFTSQLRRKWGIEKSRETYHHHAVDALIIAASSQLRLWKKHSNPLIAYKEGQFVDSETGEIVSLSDEEYKELVFKAPYDHFVDTLRSKKFEDSILFSYQ

SEQ ID NO: 1463 - protein, 151 aa, Streptococcus mutans
QITKHVARILDERFNTETDENNKKIRQVKIVTLKSNLVSNFRKEFELYKVREINDYHHAHDAYLNAVIGKALLGVYPQLEPEFVYGDYPHFHGHKENKATAKKFFYSNIMNFFKKDDVRTDKNGEIIWKKDEYISNIKKVLSYPQVNIVKK

SEQ ID NO: 1464 - protein, 125 aa, Streptococcus salivarius
YASRVVLNALQEHFRVHKTDTKVSVVRGQFTSQLRRHWGIEKTRDTYHHHAVDALIIAASSQLNLWKKQKNTLVSYSEDQLLDIETGELISDDEYKESVFKAPYQHFVDTLKSKEFEDSILFSYQ

SEQ ID NO: 1465 - protein, 128 aa, Streptococcus suis
YASKVILNALQDYFKISGIQTKVSVVRGQFTSQLRHKWGIEKTRETYHHHAVDALIIAASSQLRLWKKQESPLVVDYQEGRQVDLETGEILELTDEQYKELVYQPPYQGFVNTISSSAFDNEILFSYQ

SEQ ID NO: 1466 - protein, 125 aa, Streptococcus thermophilus
YASRVVLNALQEHFRAHKIDTKVSVVRGQFTSQLRRHWGIEKTRDTYHHHAVDALIIAASSQLNLWKKQKNTLVSYSEEQLLDIETGELISDDEYKESVFKAPYQHFVDTLKSKEFEDSILFSYQ

SEQ ID NO: 1467 - protein, 127 aa, Treponema denticola
QATKVAAKVLEKMFPETKIVYSKAETVSMFRNKFDIVKCREINDFHHAHDAYLNIVVGNVYNTKFTNNPWNFIKEKRDNPKIADTYNYYKVFDYDVKRNNITAWEKGKTIITVKDMLKRNTPIYTRQ

SEQ ID NO: 1468 - protein, 144 aa, Lactobacillus animalis
QITKYVAQLLDQRLNYDGNGVELDEKIAIVTLKAQLASQFRSEFKLRKVRALNNLHHAHDAYLNAIVANLIMAKYPELEPEFVYGKYRKAKFKGLGKATAKNTLYANVLYFLKENEVYPFWDKARDLPTIKRYLYRAQVNKVRK

SEQ ID NO: 1469 - protein, 131 aa, Lactobacillus ceti
QSVKATAEVFKRLYEDSKICYVKAENVSDFRYGSTRKMSKDDQPQPFIKNRDVNDFHHAKDAYLNIVVGNVYDVKFTQNPTRFIKANKDYSLNYIFRYPVNKKGENVWDPEQSMKIVEKTLKSNDVRVTKL

SEQ ID NO: 1470 - protein, 137 aa, Tissierellia bacterium
QSTKEIAKFFEKIFEKTTVVYSKASLVSEFREKYDIIKVREVNDAHHAQDAYLNIVVGNVFNTKFTKNYWKFTKDIKRQNEENPNEKKGYNLRKIYESDVFCNDSVAWVYSKENPKYNTINTVKDMVYRKTANITRM

SEQ ID NO: 1471 - protein, 126 aa, Veillonella parvula
QSVKAATTLLRRLYPGVDVVFVKAENVTDFRHDNNFIKVRSLNHHHHAKDAYLNIVVGNVYHERFTRNFRAFFKKNGANRTYNLAKMFNYDVNCTNAKDGKAWDVKTSMDTVKKMMDSNDVRVTKR

SEQ ID NO: 1472 - protein, 79 aa, unidentified
GEIRFDPKKNRDDHRHHAVDAITIALTDYNNINQLNWYNAQKDKLEKGIPTERPSFDEPWENFFSDAREAAGKILVSHH

SEQ ID NO: 1473 - protein, 145 aa, Enterococcus faecalis
QITKNVAGILNQRYNANSKEKKVQIITLKASLTSQFRSIFGLYKVREVNDYHHGQDAYLNCVVATTLLKVYPNLAPEFVYGEYPKFQTFKENKATAKAIIYTNLLRFFTEDEPRFTKDGEILWSNSYLKTIKKELNYHQMNIVKK

SEQ ID NO: 1474 - protein, 128 aa, Streptococcus gallolyticus
VWRFDKYRNHGYKHHAEDALIIANADFLFKENKKLQNTNKILEKPTIENNTKKVTVEKEEDYNNVFETPKLVEDIKQYRDYKFSHRVDKKPNRQLINDTLYSTRMKDEHDYIVQTITDIYGKDNTNLK

SEQ ID NO: 1475 - protein, 122 aa, Staphylococcus pasteuri
QKGLGKKKRDYLLTTENIDKIEVKKKFIERNLVDTRYASRVVLNSLQSALRELGKDTKISVIRGQFTSQLRRKWKIDKSRETYHHHAVDALIIAASSQLKLWEKQDNPMFVDYGNNQVVDKQ

SEQ ID NO: 1476 - protein, 160 aa, Prevotella histicola
ERENMTRSINQGNAENKRIREILEKEFALSYISRNDIIKYKLYEELKSNGFKTLYSDTYISKDKLFSKDFDIEHIIPKARLFDDSLSNKTIEARDVNIAKSNKTAFDFISEKYDQQGIEAYKKKLDILLQDGSISKAKYNRLLMKEADIPSGFIDRDLRD

SEQ ID NO: 1477 - protein, 159 aa, Chryseobacterium gallinarum
EREDMAKSINEATLLHQKYATILKQEFGVVNPSRNDIIRYKLYMELTVNGYKDLYTNTKIEKENLFTDKYDIDHIIPQSRFFDDSFSNKVLVPRQSNLDKGNLTAYDFMSNKGSEREEHFLNVIKELLDKGSISKAKYEKLKKKGLEIGDGFIERDLRD

SEQ ID NO: 1478 - protein, 157 aa, Parabacteroides sp.
EREELTKAIAKSTREHEEIRKLLQDEFGMMNVSRNDIIRYKLYEELKDNGYKTLYSNQYIPKEKIFSKEIDIEHIIPQSRLFDDSLSNKTLEYKAINIEKGNKTAYDFVKEKYGEEGLQQYINRCESLFNDKKAKLRKLKMEQKDIPDGFIDRDLRN

SEQ ID NO: 1479 - protein, 160 aa, Capnocytophaga canis
ERANMTANINKAKTEHEKIIKILKNEFGLPNPTRNDIIRYRLYEELKANGYKDLYTNIKIPQEKLFTKEIDIEHIIPKSRIFDDSFSNKTLSFRKTNLDKGERTAFDYMESKFGADKLEEYVARVEDLYRNNIISKAKYQKLLKKESEIGDGFVERDLRE

SEQ ID NO: 1480 - protein, 207 aa, Ornithobacterium rhinotracheale
KRAQITNNNTKNQKLNNLIKSLLIEMASDTKYENVTPYSPSQQEILKIYDEGIYSKEENSEKIKEINKIRNNNKISKSDITKYKLWLEQGYISPYTGKIIPLTKLFTAKYQKEHIIPQTKFFDDSFNNKVICEAEVNKLKDNSLAMNFIKAKGGKAVKLSDGETVTILNQEEYKQLVRTSFKKNSIKLRNLLLEEIPDTFTKRQLND

SEQ ID NO: 1481 - protein, 204 aa, Weeksella virosa
ERKRLSSIISENETTNLRIRAILEELMYDENMENVRPYSPMQQEALKIYEDGVLSSSVEIPEDIEKISKKSEPTKSEIQRYKLWLEQKYRSPYTGRPIPLSKLFTPAYQIEHIIPQARFFDDGFSNKVICESEVNALKDKMLGLEFIQNYYGQKVTTSFGEVTILTEDAYKAFVKEHYDKNRSKRNKLLLEEIPEKMIDRQMND

SEQ ID NO: 1482 - protein, 155 aa, Flavobacterium frigidarium
QRSDMTKAINKSTAEHDKIRQLLRTEFGIPRVTRNDIIRYKLWKETEGISIYTGKTIEASRLFTKDYDIEHIIPKSRLFDDSFSNKTICERQLNIDKSNKTAYSFLQEKLSAEDFDQFEKRVKSLFGKISRTKQNKLLMADNEIPEGFIDRQLRE

SEQ ID NO: 1483 - protein, 136 aa, Rikenellaceae sp.
QYVEATGHSIEPSEEDILKYRLWVEQGHCSLYTGKTIGISEFLGDGRRYDIEHTVPRSRGGEDAQYNKTLCEEEFNRDIKRDKLPSELANHTAILACVESCGWFERIEGLEHRVWGADRRAKSATTKSAKDFAIQD

SEQ ID NO: 1484 - protein, 154 aa, Jejuia pallidilutea
YELWMEQKGQCMYTGKMISITQLFSNDIDIMHTIPRWLLPDNTMANMTVGFSKYNRDLQKEKLPKQCDNYSVDVDGWGTSIEPRLEIWKKERDKWKSLFESRRKPKGNEDEEKKNKRIQEKHYFKMHLIYWNDKIERFEADEVKDSWARRQLVD

SEQ ID NO: 1485 - protein, 183 aa, Caenispirillum salinarum
RNEIAKENRENEGRRKKESAALDTFCQDNTVSWQAGGLPKERAALRLRLAQRQEFFCPYCAERPKLRATDLFSPAETEIDHVIERRMGGDGPDNLVLAHKDCNNAKGKKTPHEHAGDLLDSPALAALWQGWRKENADRLKGKGHKARTPREDKDFMDRVGWRFEEDARAKAEENQERRGRRML

SEQ ID NO: 1486 - protein, 122 aa, Salinispora pacifica
LQKFGLSPSRENIQKYILYKEIQNSVQGQSVQCPYTGQSLAITDVFGNDNKVQVEHIIPYSISLDDSLSNKTLCIAEENGKKGEKTPYQFYKSDPDHWEVVKARAFTLLPYEKAKRFVSTRD

SEQ ID NO: 1487 - protein, 123 aa, Sulfitobacter donghicola
EMGVPNTGGNRMVLRLWEDLNDDDVMKRFCPYTGQRISAGMLFDGSCDVDHILPFSRTLDDGFTNKTLCLKEANRKKRNYAPHEAAEKGLLDRDAMDSVAKYLPDNKAWRFAPDAIERFEGER

SEQ ID NO: 1488 - protein, 132 aa, Mucispirillum schaedleri
EYSEKYNTHIVKNKLNRDKVKLWRELGKDPLERKCIYTGEQINIAKLFSDEVQIEHIVPYSKTLDDSFNNKTLSMKQANYYKGNKTPYEAFKDSKDGYNYDDIIARAKLLNNDNKFKRFTKDAMDIYNRDGK

SEQ ID NO: 1489 - protein, 139 aa, Mesorhizobium sp.
VELGQDNNGENRARLKLYDEQQRAGNGVAHCPFTLDPIGITQLFSPEIEIEHVLPRSRTLDDSAANKVLCFRTINRIKRGKTPWEAFHADPKWPDIAANAEKLPPNKRWRFREDAMDVFEARTSGKMDKTTLEQMGLTT

SEQ ID NO: 1490 - protein, 122 aa, Neisseria meningitidis
EYFPNFVGEPKSKDILKLRLYEQQHGKCLYSGKEINLVRLNEKGYVEIDHALPFSRTWDDSFNNKVLVLGSENQNKGNQTPYEYFNGKDNSREWQEFKARVETSRFPRSKKQRILLQKFDED

SEQ ID NO: 1491 - protein, 122 aa, Geobacillus sp.
EYGLTLNPTGLDIVKFKLWSEQNGRCAYSLQPIEIERLLEPGYVEVDHVIPYSRSLDDSYTNKVLVLTKENREKGNRIPAEYLGVGTERWQQFETFVLTNKQFSKKKRDRLLRLHYDENEEM

SEQ ID NO: 1492 - protein, 129 aa, Bacillus okhensis
ENGIINPRGYDIVRYKLWQEQKQKCAYSGKVIPSETFFGELKKERGQGAPTLDVDHIIPYSKCFNDSYSNKVLVYSDENRKKGNHLPFDYLKESPSRWEEFETYVLTNEFPRAKRERLLKKQFSEDEES

SEQ ID NO: 1493 - protein, 124 aa, Tistrella mobilis
GLLALEDVDDDTLLRYRLWKEQGGKCLYTGKDIHVRQLIATDNSVQVDHILPWSRFGDDSFNNKTLCLASANQRKRGQTPWEWFSLTGTPEAWEVFASRVETSKDLRGFKKRNLLLKNADEVAQ

SEQ ID NO: 1494 - protein, 122 aa, Kingella kingae
QFFPNAAHEPKAVDILKLRLYQLQQGKCLYSGLPIDVRRLPEKGYVEIDHALPFSRTWDDSFNNKILVLASENQNKGNQTPYEYLRGADNSESWRLFVENVQNCQFSPNKKQKIMAKQLDEK

SEQ ID NO: 1495 - protein, 120 aa, Clostridium perfringens
ELMDKEPTVVEVLKYRLWEQQRGECAYTQSQIPLERLFSPGYCEIDHIIPFSRSFDDSLSNKILVLGSENQRKGNRTPYEYFGEDSERWNSFEIWVKGSYLNYKKKANLLKKKFSEEEQR

SEQ ID NO: 1496 - protein, 125 aa, Neisseria sp.
ELFPRFTGEPKSGDILKLRLYQQQQGKCLYSGIPIDLGRLNEKGYVEIDHALPFSRTWDDSFNNKVLVLGSENQKKRNQTPYEYLDGARDSQRWREFQARVQGCRFPYAKKQRIQTAKLDSKTEQ

SEQ ID NO: 1497 - protein, 117 aa, Campylobacter coli
NFGLKANAKNILKLKLWKEQKEFCIYSGKKISIEHLRDEKALEVDHIYPYSRSFDDSFLNKVLVFTKENQEKLNKTPFEAFGANEERWSKIQALAQNLPYKKKNKILDEAFKGKQQQ

SEQ ID NO: 1498 - protein, 120 aa, Sulfurospirillum sp.
EGVKPSYKNILKSKLRSEQKDTCPYCQKNLHYPMIFEDGYAEIDHILPLSQSQDDSYVNKVLVHSACNQNKKNRTPFEWFQDEKKDWDTFKSYILMESTLGEKKRNYLIKENFSDPQSRK

SEQ ID NO: 1499 - protein, 127 aa, Dechloromonas denitrificans
ELFGHPPKGLEFEKWRLYREQNGQCAYSQRPLTASGNVAEIFLDGSTEIDHALPYSRSFDDSKNNKVLVLTRENRDKGNRTPYEYLGGAENSESWQRFVSFVESNKAYRLAKRTRLLRKDFGAKESE

SEQ ID NO: 1500 - protein, 117 aa, Nitratifractor salsuginis
EFPSIDKRLARKIQLWERQKGLDLYSGKVINLSQLLDGSADIEHIVPQSLGGLSTDYNTIVTLKSVNAAKGNRLPGDWLAGNPDYRERIGMLSEKGLIDWKKRKNLLAQSLDEIYTE

SEQ ID NO: 1501 - protein, 140 aa, Enterococcus cecorum
KEANLSENGLIDFLRKGKNRALKIRLWYQQEGKCLYTGEPILAEDLCKNEANYDIDHIIPISVSFDDSINNKVLCSSHFNRFEKEKKTPFEYFSNKSSHLGRYSNFDEFRASVNANKRISDVKRKNLLSKELLSDLDTRK

SEQ ID NO: 1502 - protein, 132 aa, Facklamia hominis
ERSGWDTIRFESALKKPRFAEKLLFYYEQKGKCAYSGQDILAESLLNESCEVDHIIPLSISFDDSIHNKVLVTASSNQEKGQRTPYMAFIDGAKLGQSWDDFVAWVNSCGFHRKKVQNLLYEENIFNPDVQR

SEQ ID NO: 1503 - protein, 135 aa, Streptococcus sinensis
HQYNGKKELPDNVFHGHKELATKIRLWHQQGEKCLYTGKNIPISDLIHNQYKYEIDHILPLSLSFDDSLANKVLVLATANQEKGQRTPFQALDSMDDAWSYREFKAYVRGARALSNKKKDYLLNEEDINKIEVKQ

SEQ ID NO: 1504 - protein, 133 aa, Eubacterium dolichum
DDRKINAKLREKLVLYQEQDGKTAYSLEPIDLKLLIDDPNAYEVDHIIPISISLDDSITNKVLVTHRENQEKGNLTPISAFVKGRFTKGSLAQYKAYCLKLKEKNIKTNKGYRKKVEQYLLNENDIYKYDIQK

SEQ ID NO: 1505 - protein, 135 aa, Streptococcus macedonicus
YLYNGTDKLPDEVFHGNKQLETKIRLWYQQGERCLYSGKPIPIQELVHNSNNFEIDHILPLSLSFDDSLANKVLVYSWTNQEKGQKTPYQVIDSMDAAWSFREMKEYVLKQKGLGKKKRDYLLTTENIDKIEVKK

SEQ ID NO: 1506 - protein, 137 aa, Turicibacter sp.
NEYGFGEEAYRQQNDLNTKLRLWYEQKQRCLYSGEIIKIFDLIKNPHLFDIDHIIPKSISYDDSLSNKVLCYATENREKGNLTPYRYFKRKASLTWNYEAYKSYVIELYKDGKGDLSRTKLELLLFEEDINKYEVRQ

SEQ ID NO: 1507 - protein, 132 aa, Bacillus niameyensis
VKSLKDLRLNSKQHLALKLWVSQDRKCIYSGRSISINDIVQDPSKFEIDHILPVSLSFDDSQANKVLCYHRENQKKGQKTPFQYFSTGQASRSFDQFKVEVLNLYKSRKINNKKKDYLLEIRDIAHNEELQK

SEQ ID NO: 1508 - protein, 125 aa, Massilibacterium senegalense
QLGVYDTKGLFEMIKLWHLQDGHCMYSLTPIPLNDLFLNPNHYEIDHIIPRSISFDDSINNKVLVKYIENQKKGNLTPYQYMNRKIDGVSYDKFKQHVLQLAKSSDKMSRKKREYLLEERDINKF

SEQ ID NO: 1509 - protein, 156 aa, Kurthia huakuii
TQSRLMKFKAVVDGLGKDEKSLKNELNSYLNEPEAKFKDNRFYLYLLQQGKCAYSGKPLDVQHLAQYEIDHIYPQNFVKDDSLDNLVLVEKSRNQQKGGFKMPLEILNAAEGARMRGIWKSWLDKGFMNDKKFHRLCKAAFSELDRDQFIARQLVE

SEQ ID NO: 1510 - protein, 158 aa, Streptococcus equinus
GRNKSNQRLKRLQDSLKEFGSDILSKKKPSYVDSKVENSHLQNDRLFLYYIQNGKDMYTGEELDIDHLSDYDIDHIIPQAFIKDNSIDNRVLTSSAKNRGKSDDVPSIEIVRNRKSYWYKLYKSGLISKCKFDNLTKAERGGLTETDKAGFIKRQLVE

SEQ ID NO: 1511 - protein, 151 aa, Streptococcus equi
GIKNARQRMRKLEETAKKLGSNILKEHPVDNSQLQNDKRYLYYLQNGKDMYTGDDLDIDYLSSYDIDHIIPQSFIKNNSIDNKVLTSQGANRGKLDNVPSEAIVRKMKGYWQSLLRAGAISKQKFDNLTKAERGGLTQVDKAGFIQRQLVE

SEQ ID NO: 1512 - protein, 148 aa, Enterococcus faecium
GLKSSRPRLKALEESLKDFGSQLLKEYPTDNSSLQKDRLYLYYLQNGRDMYTGAPLDIHRLSDYDIDHIIPRSFTTDNSIDNKVLVSSKENRLKKDDVPSEKVVKKMRSFWYDLYSSKLISKRKLDNLTKIKLTEEDKAGFIKRQLVE

SEQ ID NO: 1513 - protein, 148 aa, Enterococcus italicus
GKQNSKPRLKGIENGLKEFSDSVLKGSSIDNKQLQNDRLYLYYLQNGKDMYTGHELDIDHLSTYDIDHIIPQSFLTDNSIDNRVLTTSKSNRGKSDNVPSEEVVRKMDRFWRKLLNAKLISERKYTNLTKKELTESDKAGFLKRQLVE

SEQ ID NO: 1514 - protein, 155 aa, Streptococcus agalactiae
GRRNSRQRYKLLDDGVKNLASDLNGNILKEYPTDNQALQNERLFLYYLQNGRDMYTGEALDIDNLSQYDIDHIIPQAFIKDDSIDNRVLVSSAKNRGKSDDVPSLEIVKDCKVFWKKLLDAKLMSQRKYDNLTKAERGGLTSDDKARFIQRQLVE

SEQ ID NO: 1515 - protein, 152 aa, Streptococcus ratti
GRRNSQQRYKRLEEAIKNLDRDLNYKILKEHPTDNQALQNDRLFLYYLQNGRDMYTGESLDINRLSDYDIDHIIPQAFIKDNSIDNRVLVSSAKNRGKSDDVPSEDVVNRMRPFWNKLLNCGLISQRKYSNLTKKELTPNDKAGFIKRQLVE

SEQ ID NO: 1516 - protein, 151 aa, Listeria monocytogenes
GKNNSRPRYKSLEKAIKEFGSQILKEHPTDNQELKNNRLYLYYLQNGKDMYTGQELDIHNLSNYDIDHIVPQSFITDNSIDNLVLTSSAGNREKGDDVPPLEIVRKRKVFWEKLYQGNLMSKRKFDYLTKAERGGLTETDKARFIHRQLVE

SEQ ID NO: 1517 - protein, 154 aa, Lactobacillus sp.
KRTQSRQKQIQTVYANAAQELIDSAVRGELEDKIADKASFTDRLVLYFMQGGRDIYTGAPLNIDQLSHYDIDHILPQSLIKDDSLDNRVLVNATINREKNNVFASTLFASKMAATWRKWHEAGLISGRKLRNLMLRPDETDKFAHGFVARQLVE

SEQ ID NO: 1518 - protein, 154 aa, Pediococcus acidilactici
QRTQSRLRTLEKLYESAEEVVDAGLTAELAEFKENKHVLSDKYYLYFTQLGRDVYTGDTISLDKLNDYDVDHILPQSFIKDDSLDNRVLTIRAVNNGKSDNVPAKMFGKKMGSFWRYLLDNGMISKRKYNNLITDPDNISKYAQKGFINRQLVE

SEQ ID NO: 1519 - protein, 158 aa, Acidaminococcus sp.
RSVTRREQIKNLYRSIRKDFQQEVDFLEKILENKSDGQLQSDALYLYFAQLGRDMYTGDPIKLEHIKDQSFYNIDHIYPQSMVKDDSLDNKVLVQSEINGEKSSRYPLDAAIRNKMKPLWDAYYNHGLISLKKYQRLTRSTPFTDDEKWDFINRQLVE

SEQ ID NO: 1520 - protein, 163 aa, Lactobacillus sp.
LSHIRGTKLLKAYQETAGELVDQKLTDSLKEAMTSRKLLKDKYFLYFMQAGRDAYTGQKINIDEVSTNYQIDHILPQSFIKDDSFDNRVLTATPLNAEKSDDVPYKRFANNYVSDLKMTVGEMWKHWQKDGIINKHKLGNLLLDPDRLNKYQKSGFINRQLVE

SEQ ID NO: 1521 - protein, 161 aa, Treponema putidum
RTKTRLKILQDLYNSCKNDADAFSSEIQYLLGKIENEDNLRLRSDKLYLYYTQLGKCMYCGKPIEIGHVFDTSKYDIDHIYPQSKIKDDSINNRVLVCSSCNKNKEDKYPLKPEIQLKQKKFWNFLQRNNFISIEKFNRLTRTTPISDDETAKFIARQLVE

SEQ ID NO: 1522 - protein, 164 aa, unidentified
RNRKERQQESERMRSRERARSQARTALAPYYGENVPNREIEKYLLWEECGHRCPYTGEVVALSDLFGPYPRFEVEHIIPFDRCLDDSFQNKTLCEINKNREKGKRTPWEAFGHTPEWPSMVERVRAFGNSAKLRRFIIRETEAERLLEEFSSRQLNDARYASRL

SEQ ID NO: 1523 - protein, 160 aa, unidentified
MNSNERQKLTKAMRDQQKKNEEYEEILKKEFNILKPSRTDIIRYRLYIDQKQRCLYTGKPIQKTQLFNGETDIDHIIPRQRYFDDSYNNKVLCFRNVNEEKSNMTSYEFMQQKGIDKWEDFTRRVNELYKEGLISKKKKNYLLSDEIPKDFINRQLNETR

SEQ ID NO: 1524 - protein, 162 aa, unidentified
TKKERLKAIQTQNKNIESKKQAEQLLKEKDLNNPSPKKDISKKDILKARLYNQQDGISLYSGEPIKLERLTEDGYCQIDHILPRFKSMDNSFNNKVLCLAEENQNKANDIPYDWLSKTGQFDEFKARVLSMKDKLSYQKVKRLLTEKIDAEGFIERDLNDTR

SEQ ID NO: 1525 - protein, 162 aa, Eubacterium sp.
HRDSRKNRLMELYKNCKKEAEKFCPYFDALSKKLSDEDESKLRRDKLYFYYIQLGKCMYTGEEISLGELMNGNGRFDIDHIYPRSKIKDDSLTNKVLVNKTVNNNKTNVYPIDAAIQSKMSPYWQMLRSSGLISEETYKRLTRKTPLTDDELSAFVSRQLTE

SEQ ID NO: 1526 - protein, 160 aa, unidentified
KSADKRKEEERRQRENLKEREELEEQFRETFDGREPNGTDMLKWRLYREQRGCCAYSLQPIDLNRLCEPGYVEVDHILPYSRSFDNSRANKVLVLISENRNKLNRTPYEYFGHNEKRWSEYEGWVRTTIRDPRKRGNLLRESFEERQEVEWKDRNLNDTR

SEQ ID NO: 1527 - protein, 157 aa, unidentified
QNRQQKDEAIRQNRSNETERARMREELASLGYADTPGNMLLLRLYFELPPDERVCVYSGEPISKEMLFSGAVDIDHILPRSKTLDDGFANKVLCTREMNRRKGNRAPADAWSAEELLIIHERSKRLFPRKAWRFAPDAMEKYAENNDFLARHLTDSQ

SEQ ID NO: 1528 - protein, 162 aa, unidentified
RSKRDREEFQRVIRQRETERKAAIRDLETNGIVQPSRSDIEKWLLWKESGQICPYTGDAIGFDDLFRTGRFEVEHIWPRSRCLDDSFANKTLCRSDINKEKGNRTPYEHLGSNTDQWHRMQDRLKGMVRKGKKPGMAFSKTKRFLAKEIPDDFTHRMLNDTS

SEQ ID NO: 1529 - protein, 147 aa, Bifidobacterium bombi
STQLAEQRERDRRYADNLKMLSNYEGASSRSDVRRIKALQRQNCQCIYCGRTITFETCQMDHVLPRKGPGSDSKFENLVATCGECNKSKSDTLYMNWAKTYPNTNLQDVLRRIQEWSKDGWMTDKRWRQYKEALILRLEATEKQEPL

SEQ ID NO: 1530 - protein, 162 aa, unidentified
KSHKDRNDIKKSQEEFQALKEEAKAEAIKILGKEPSAKELLKFRLWKEQNGECIYSGAYISPSILADPYATEVDHILPYSRSLDDSLNNKVLCLTKQNQDKGNKTPFEYFGADKDSKEWQEFTGRVEGLKNIKGAKKGRLTKTNFDESSENAFKERNKNDTS

SEQ ID NO: 1531 - protein, 155 aa, Corynebacterium camporealensis
AKAREIDRDNNRRAQRNRELFGKMQSKLGIEGKPRSADLWRFQSVQRQNCCCAYCGDTITFQNCEMDHIVPRAGEGSTNTRDNLVAVCHRCNLAKKNIPFAVWAKNANIPGVSLKEALNRTRHWVEDTGMSSKDFQRFVSNVRARLKRTSVDEPL

SEQ ID NO: 1532 - protein, 169 aa, unidentified
QNHEQRKEESKRQAENQDRNKRLRSNIAGILKISEEQVSRDDIEKMILWEELSHDVADRKCPYSGVPISASMLLSSEVEIEHILPFSQTLDDSLNNKTVSMRQANRIKGNRTPWEAKQDFEAQGWKFDDILARAGNMKKEKRYRFAEDGYKRWLKDDAGFLPRALNDTR

SEQ ID NO: 1533 - protein, 169 aa, unidentified
LTGKDKANYMRTLAERERQRKQAAKELKASLGREPTAGDIEKWLLWQECEKTCPYTFDSIGFADLFGNMPRYDIEHIWPRSLSLDDSFANKTLCRRDVNNKKGQRTPFELYASNHGIADLPDWEEVKIHLRNKVDAGHFPESKWKRFTREQPFAAADDRSDDRLIGDTA

SEQ ID NO: 1534 - protein, 157 aa, Legionella pneumophila
DKTLEQAIEKQNIQWEEKFQRIINASMNICPYKGASIGGQGEIDHIYPRSLSKKHFGVIFNSEVNLIYCSSQGNREKKEEHYLLEHLSPLYLKHQFGTDNVSDIKNFISQNVANIKKYISFHLLTPEQQKAARHALFLDYDDEAFKTITKFLMSQQK

SEQ ID NO: 1535 - protein, 156 aa, unidentified
LSKKQKKALNKQNKRNREANQEAAEQVIRITGVEHPSYDDKLKYRLWKECGGVCPYTGKAISLHELFSDAVDIEHILPYHRTLDDSYMNKTICWADFNRNVKRNQTPWEVLGGDADAWGQLLQRIRSWPKAKRDRMERRSLDGIEDFINRQLNDTR

SEQ ID NO: 1536 - protein, 168 aa, unidentified
KNAKEREDLSKAINTGKIEHDRIIKILQNEDGIKFPTRNDIIRYKLYQELKNNSYKDLYTNTYIERKDLFTNKYDIEHIIPQSRLFDDSFSNKTIVPRQVNLEKGNRTAYDYILEVKGEKAAEEYTQRIEHMYTQKEDGISKAKYKKLLMKESEIGSGFIERDLRDSQ

SEQ ID NO: 1537 - protein, 164 aa, unidentified
NPKNRRLEIQRQNKRQQQYHEKVIDRLRELGIDETYDNVLKYKLWEECNATCPYTGRPIAVNQLFSNQIQIEHIIPYSRSLDDSFMNKTLCFSDENARKGDRTPYEYYHGVLGSEKWVDVKQRALSLFKNSRDFPNRYKKFERFVLTSTQDLEGFISRQLNDTR

SEQ ID NO: 1538 - protein, 164 aa, Acidaminococcus intestini
SKKKRSVTRREQIKNLYRSIRKDFQQEVDFLEKILENKSDGQLQSDALYLYFAQLGRDMYTGDPIKLEHIKDQSFYNIDHIYPQSMVKDDSLDNKVLVQSEINGEKSSRYPLDAAIRNKMKPLWDAYYNHGLISLKKYQRLTRSTPFTDDEKWDFINRQLVETR

SEQ ID NO: 1539 - protein, 160 aa, Coriobacterium glomerans
PKKKGRRTKRRYNDLKDALEAFKKEDPELWRELCETAPNDMDERLSLYFMQRGKCLYSGRAIDIHQLSNAGIYEVDHIIPRTYVKDDSLENKALVYREENQRKTDMLLIDPEIRRRMSGYWRMLHEAKLIGDKKFRNLLRSRIDDKALKGFIARQLVETG

SEQ ID NO: 1540 - protein, 157 aa, Eggerthella sp.
TKKKGKRTTTRYSNIQKALEALKEEGAEALRELKTYKHNELDKRLSLYFMQNGKSLYSGIPLDIRRLSEYQIDHIIPQSYIKDDSYENMALVLPGENQSKADNLLISQDIRIKMKATWTALHKAGLMGDKKYNNLMNSSISDAKMKGFINRQLVETS

SEQ ID NO: 1541 - protein, 168 aa, Finegoldia magna
EKKTTISRKNKLLDLYKAIKKDERDSQYEKLLTGLNKLDDSDLRSRKLYLYYTQMGRDMYTGEKIDLDKLFDSTHYDKDHIIPQSMKKDDSIINNLVLVNKNANQTTKGNIYPVPSSIRNNPKIYNYWKYLMEKEFISKEKYNRLIRNTPLTNEELGGFINRQLVETR

SEQ ID NO: 1542 - protein, 159 aa, Lactobacillus rhamnosus
TAGKRTQSRQKQIQTVYANAAQELIDSAVRGELEDKIADKASFTDRLVLYFMQGGRDIYTGAPLNIDQLSHYDIDHILPQSLIKDDSLDNRVLVNATINREKNNVFASTLFASKMAATWRKWHEAGLISGRKLRNLMLRPDEIDKFAHGFVARQLVETR

SEQ ID NO: 1543 - protein, 178 aa, Mycoplasma gallisepticum
EEKELENTKNYEKLIKKNSDKISERLEALDIAEDKIEDILKSPTKSYKVLLWLQQDHIDPYSQKEIAFEDILTKTEKTEIDHIIPYSISFDDSSSNKLLVLAESNQAKSNQTPYEFITSGNAGIKWEDYEAYCRKFKDGDTSLLDSTQRSKKFAKMMKTDTSSKYDIGFLARNLNDTR

SEQ ID NO: 1544 - protein, 164 aa, Streptococcus agalactiae
TTAKGLSRSRQRLTTLRESLANLKSNILEEKKPKYVKDQVENHHLSDDRLFLYYLQNGRDMYTKKALDIDNLSQYDIDHIIPQAFIKDDSIDNRVLVSSAKNRGKSDDVPSIEIVKARKMFWKNLLDAKLMSQRKYDNLTKAERGGLTSDDKARFIQRQLVETR

SEQ ID NO: 1545 - protein, 157 aa, Streptococcus dysgalactiae
TTQKGQKNSRERMKRIEEGIKELGSQILKEHPVENTQLQNEKLYLYYLQNGRDMYVDQELDINRLSDYDVDHIVPQSFIKDDSIDNKVLTRSDKNRGKSDNVPSEEVVKKMKNYWRQLLNAKLITQRKFDNLTKAERGGLSELDKAGFIKRQLVETR

SEQ ID NO: 1546 - protein, 164 aa, Streptococcus gallolyticus
TTNRGRNQSQQRLKKLQDSLKELGSNILNEEKPSYIEGKVENNHLQDDRLFLYYIQNGKDMYTGDELDIDHLSDYDIDHIIPQAFIKDDSIDNRVLTSSAKNRGKSDDVPSLDIVHDRKADWIRLYKSGLISKRKFDNLTKAERGGLTENDKAGFIKRQLVETR

SEQ ID NO: 1547 - protein, 173 aa, Streptococcus gordonii
EEDAKKDYIKRQKANQDEKNAAMEKAAFQYNGKKELPDNIFHGHKELTTKIRLWHQQGEKCLYTGKNIPISDLIHNQYKYEIDHILPLSLSFDDSLSNKVLVLATANQEKGQRTPFQALDSMDDAWSYREFKSYVKDSKLLSNKKKDYLLTEEDISKIEVKQKFIERNLVDTR

SEQ ID NO: 1548 - protein, 216 aa, Streptococcus mutans
AKAQVIGETDNLNQVVSDIAGSPAIKKGILQSLKIVDELVKIMGHQPENIVVEMARENQFTNQGRRNSQQRLKGLTDSIKEFGSQILKEHPVENSQLQNDRLFLYYLQNGRDMYTGEELDIDYLSQYDIDHIIPQAFIKDNSIDNRVLTSSKENRGKSDDVPSKDVVRKMKSYWSKLLSAKLITQRKFDNLTKGERGGLTDDDKAGFIKRQLVETR

SEQ ID NO: 1549 - protein, 173 aa, Streptococcus salivarius
EDDEKKAIQKIQKANKDEKDAAMLKAANQYNGKAELPHSVFHGHKQLATKIRLWHQQGERCLYTGKTISIHDLINNSNQFEIDHILPLSITFDDSLANKVLVYATANQEKGQRTPYQALDSMDDAWSFRELKAFVRDSKALSNKKKEYLLTEEDISKFDVRKKFIERNLVDTR

SEQ ID NO: 1550 - protein, 173 aa, Streptococcus suis
EDEEKKRIADGQKANAKEKADSILRAAELYCAGKVLPDYVYNGHNQLATKIRLWYQQGERCIYTGQPISIHDLIHNQNQYEIDHILPLSLTFDDSLSNKVLVLATANQEKAQRTPYNYLKSATSAWSYREFKDYVTKRKGIGKKKCEYLTFEEDINGFEVRSKFIQRNLVDTR

SEQ ID NO: 1551 - protein, 173 aa, Streptococcus thermophilus
EDDEKKAIQKIQKANKDEKDAAMLKAANQYNGKAELPHSVFHGHKQLATKIRLWHQQGERCLYTGKTISIHDLINNPNQFEVDHILPLSITFDDSLANKVLVYATANQEKGQRTPYQALDSMDDAWSFRELKAFVRESKTLSNKKKEYLLTEEDISKFDVRKKFIERNLVDTR

SEQ ID NO: 1552 - protein, 167 aa, Treponema denticola
LEPARTKTRLKILQDLYNNCKNDADAFSSEIKDLSGKIENEDNLRLRSDKLYLYYTQLGKCMYCGKPIEIGHVFDTSNYDIDHIYPQSKIKDDSISNRVLVCSSCNKNKEDKYPLKSEIQSKQRGFWNFLQRNNFISLEKLNRLTRATPISDDETAKFIARQLVETR

SEQ ID NO: 1553 - protein, 154 aa, Lactobacillus animalis
KTHGTRKREDRVQQIVENLKDANELPEKLPSNAELSDERKYLYCLQNGRDMYTGAPLDYDHLQFYDVDHIIPQSFLKDDSIENKVLTIKKENVRKTNGLPSEAVIQKMGSFWKKLLDAGAMTNKKYDNLRRNLHGGLNEKLKERFIERQLVETR

SEQ ID NO: 1554 - protein, 162 aa, Lactobacillus ceti
APKVKNTKRYDALEKKYESVKEHEYAEVKKEFEIEKNDSLNIKKLFLYFTQLGHCMYSDEKIPYNELFTNRYDIDHIYPRSKTRDNSMDNLVLVKAECNRDKKDNYPIKLKTNIQQKCQVRWAYLRDKKLITEEKYNRLVRKTPLTEDELSQFIARQLVFTS

SEQ ID NO: 1555 - protein, 166 aa, Tissierellia bacterium
EKGKTTEKRKDKIKKLYKNIKDTLSDYCNNLQDLTLQVEKYDDNRLRQKKLFLYFMQMGKSMYTGRCIDLEDLFNNNVYDIDHIYPQSKVKDDSFDNIVLVEKEENHRKSNELLKEEIQSRMNNYWIFLRENKFISKEKYNRLTRKKDFTDEELGDFVARQLVTTR

SEQ ID NO: 1556 - protein, 170 aa, Veillonella parvula
NEKKKKDSRQKRLSDLYAAIKKDDVLLNGLNNEIFGELKSSLAKYDDAALRSKKLYLYYTQMGRCAYTGEIIELSLLNTDNYDIDHIYPRSLTKDDSFDNLVLCKRTANAQKSDAYPISEEIQKTQKPFWTFLKQQGLISERKYERLTRITPLTADDLSGFIARQLVETN

SEQ ID NO: 1557 - protein, 169 aa, unidentified
LSKKGRQNVSRMIHQNFEANENVREILKDYQLAPSRQNIQKVLLFNEIQEKAGKVVCPYSGRTLNISDLLGSENKVQIEHIIPRSFSQDDSFTNKTICDAKFNQLKGNLTPYQFYQQNNNKTLWGAATWEEVEQRAYSVLPFNKAKRFTTRKTEWKTEEFISRQLNDDR

SEQ ID NO: 1558 - protein, 157 aa, Enterococcus faecalis
TTSTGKRRSIQRLKIVEKAMAEIGSNLLKEQPTTNEQLRDTRLFLYYMQNGKDMYTGDELSLHRLSHYDIDHIIPQSFMKDDSLDNLVLVGSTENRGKSDDVPSKEVVKDMKAYWEKLYAAGLISQRKFQRLTKGEQGGLTLEDKAHFIQRQLVETR

SEQ ID NO: 1559 - protein, 173 aa, Streptococcus gallolyticus
NQNAKRIVEKIRLHDQQEGKCLYSLESIALMDLLNNPQNYEVDHIIPRSVAFDNSIHNKVLVKQIENSKKGNRTPYQYLNSSDAKLSYNQFKQHILNLSKSKDRISKKKKDYLLEERDINKFEVQKEFINRNLVDTRYATRELTSYLKAYFSANNMDVKVKTINGSFTNHLRK

SEQ ID NO: 1560 - protein, 167 aa, Staphylococcus pasteuri
VRQTIKIINAAVKKYGDFDKIVIEMPRDKNADDEKKFIDKRNKENKKEKDDALKRAAYLYNGTDKLPDEVFHGNKQLETKIRLWYQQGERCLYSGKPIPIQELVHNSNNFEIDHILPLSLSFDDSLANKVLVYAWTNQEKGQKTPYQVIDSMDAAWSFREMKDYVLK

SEQ ID NO: 1561 - protein, 73 aa, Prevotella histicola
KVGAALDEVTIKKVSSSFIREALLDRLHEYNGDAKKAFTGRNSIDKNPIYIDEEHKKTVPALVKTIEWEMYHP

SEQ ID NO: 1562 - protein, 133 aa, Chryseobacterium gallinarum
KQHLKEILVSHKTKNKVVTSNINKTKKKGGIHKKTELTPRGQLHKETVYGSKKFLQSREEKVSAKFDYETILMVVNPIHRNALLNRLKEYGNDPKKAFSGKNAINKNPVYLDDSKTDILSEKVTLSWYETGYT

SEQ ID NO: 1563 - protein, 73 aa, Parabacteroides sp.
KVNASFDAAKIATVSKRAYRNALLKRLETFGNDPKKAFTGKNALEKNPLYADKYQTIRVPEKVQTVEFETIYT

SEQ ID NO: 1564 - protein, 73 aa, Capnocytophaga canis
KIGGKFDLETIKKVANPLYQSLLKKRLEENGGDPKKAFTGKNSLAKNPIYLDDAQTEQLPEKVKLVWLENSFS

SEQ ID NO: 1565 - protein, 78 aa, Ornithobacterium rhinotracheale
TIYGIVCKKLPLKSALENYKNIIDENLKHKIKELKEVNKFDNNQIINFFKECNFIFEDNNIQKVEVYDFKDNRDKTIL

SEQ ID NO: 1566 - protein, 19 aa, Weeksella virosa
TVSGKIDLPRVKVSKGKIL

SEQ ID NO: 1567 - protein, 73 aa, Flavobacterium frigidarium
KVNANFTAAHIAKVANKAYREALLKRLEENENDPKKAFTGKNSLAKTPIYISLKDNITVPEKVKLVWLEDNYT

SEQ ID NO: 1568 - protein, 106 aa, Rikenellaceae sp.
EVKYMQGDTARGALHQQTFYGAIERDGEIRYVVRKSLDQLLPADVEKIVDEAVRQKVREAVEAYGFKEATDPTKHTVWMNEEKQIPIRKVRILTGVKNPILLKPHR

SEQ ID NO: 1569 - protein, 63 aa, Jejuia pallidilutea
ELFAQTYLGKIKDVERYDDSSPKRNTENTDWIYKKGKDEFIFVKRENIDKVKSSDKLIKSIID

SEQ ID NO: 1570 - protein, 103 aa, Caenispirillum salinarum
QDPETGRVHWRLTRAGRGLKRRIDDLTRNCVILSRPRRPSETGTPGALHNATHYGRREITVDGRTDTVVTQRMNARDLVALLDNAKIVPAARLDAAAPGDTIL

SEQ ID NO: 1571 - protein, 114 aa, Salinispora pacifica
SVRGQLHKDTVYGKHYIPGSDEPGYHVRKQITDLTSLSKIADAGTHEILRTFVEENGYSIDEKEKVKGEWFTKGNDYQVIMPSSGKPGNPIKKVRIRENLGNAVQWHTGINQYV

SEQ ID NO: 1572 - protein, 101 aa, Sulfitobacter donghicola
SLAKGRGEDTTSGALHEATALGIIDETHVTVRIPIESLKSGHLIEGSRNGYIRDPYLRDQLTLATKNGSDKDFTTVLQKFFDRSKRYGGTRRVRIIKTLQD

SEQ ID NO: 1573 - protein, 82 aa, Mucispirillum schaedleri
HKADRSISGKLHEDTAYGIVENDDKYNVVTRWTVDKFKEQKHFETIRDNELKEIACSDKELFAKIVETRKIKSIRKLAKENP

SEQ ID NO: 1574 - protein, 59 aa, Mesorhizobium sp.
DEAEAEEIGNLVRRKLLVDLTPGEVDRIRDAGLRKAMQAAVAPSRDARGKVSDAKGFAA

SEQ ID NO: 1575 - protein, 119 aa, Neisseria meningitidis
RAPNRKMSGAHKDTLRSAKRFVKHNEKISVKRVWLTEIKLADLENMVNYKNGREIELYEALKARLEAYGGNAKQAFDPKDNPFYKKGGQLVKAVRVEKTQESGVLLNKKNAYTIADNGD

SEQ ID NO: 1576 - protein, 121 aa, Geobacillus sp.
RMPKRSVTGAAHQETLRRYIGIDERSGKIQTVVKTKLSEIKLDASGHFPMYGKESDPRTYEAIRQRLLEHNNDPKKAFQEPLYKPKKNGEPGPIIRTVKIIDTKNQVIPLNDGKTVAYNSN

SEQ ID NO: 1577 - protein, 118 aa, Bacillus okhensis
RMPRRSVTGPVHKETISKDGGVDEKGKTLIVKKVQLQDIKFNKNGDFLMYMEETDPATYKAIKERYLSFNKDAKKAFQDPLYKPSKKGKPNQIKSVKVIVEKKAHVRKVNGGVAENGD

SEQ ID NO: 1578 - protein, 81 aa, Tistrella mobilis
QVFERRGLADLKEADLDRVKDPERNQAIIEAVRAWILAGRPADAPPRSPRGDVIVKLRTAPAKKIKPAVPVRGGTADRGDM

SEQ ID NO: 1579 - protein, 110 aa, Kingella kingae
RMPTRKMTGQGHKETIKSAKRLDEKISVLRVPLTQLKLNDLENMVNREREPALYEALKARLEQFKNDPAKAFAEPFFKQGGQQVKAVRVEIVQKSGMLLRKINGVADNGS

SEQ ID NO: 1580 - protein, 115 aa, Clostridium perfringens
RVPFRKISGKLFKETIYSERAFKDGYFVSKKSLVDLKRGDLDNFYNYECDKKLYDAISERMKEFNYNGKKAFESPFRKPTKSGKEGPVVRSVKIKSAVPFKDGIPMNEGLVAKEG

SEQ ID NO: 1581 - protein, 115 aa, Neisseria sp.
RAPNRKMTGQGHLETVKSAKRLSENISVVKKPLTALKLKDIENIVGYPDREPALYRALQERLQAYKDDPAKAFAEPFYKPAKDGGQGSLVKAVRIIENTKHGLKVRNGITDTNGD

SEQ ID NO: 1582 - protein, 53 aa, Campylobacter coli
KPPRKRARGALHKETFYPKDEMIKKYNSQEGVEIALNCGKIRKIGTKYVENDT

SEQ ID NO: 1583 - protein, 57 aa, Sulfurospirillum sp.
RPPRASVTGAAHEQTAKPYPRIKPIKNKYKRRRIPIDEDKFELFRNDKVASGNDKNF

SEQ ID NO: 1584 - protein, 118 aa, Dechloromonas denitrificans
RAPQRRNGGAAHKDTIYGQPEKLKKNGSVTQKVALTSLTLKDIDLLADPHRNAKLYGAIRERLEAHGGKGDKAFPATNPLRKPDKEGNPTGPIVRTVTKVIDKLSGIPVRGGIAKNDT

SEQ ID NO: 1585 - protein, 131 aa, Nitratifractor salsuginis
SYWVDKKPLSASSHKETVYSSRHEVPTLRKNILEAFDSLNVIKDRHKLTTEEFMKRYDKEIRQKLWLHRIGNTNDESYRAVEERATQIAQILTRYQLMDAQNDKEIDEKFQQALKELITSPIEVTGKLLRK

SEQ ID NO: 1586 - protein, 149 aa, Enterococcus cecorum
KISDAMIYSSRKKKLSKDKKEKEYSLGTINDIYSDAGYSKFKNIYKKDKEKFLMYHLDHKSFEILEDIISQYPDKEEYIDSEGKVKQRAVSPFEIYRRKYGYIRKYSKKNNGPIIKNMKYYNENLPKIYIDITPKQSIDKKVYLTNISP

SEQ ID NO: 1587 - protein, 161 aa, Facklamia hominis
KISDATIYSTRKIVETKINKKGVAKETVKDIVIDKIKDIYTPEGWRKFKEKQDKLLMKNFDEKTYNKLIKIAKEYPEKKEVQTSNGKVSLVEVSPFKMYCEEQNVPAIRKYSKKGNGPYIRSLKFYDKELGKHINITKDSYGNDIERTIRNKKIILKNQNS

SEQ ID NO: 1588 - protein, 144 aa, Streptococcus sinensis
KISDATIYSTRKAKLGKDKSEETYVLGKIKDIYTQTGYDAFIKLYKKDKSKFLMYHKDPITFEKVIEEILKTYPDKEINEKGKEVACNPFEKYRQENGPLRKYSKKGKGPEIKSLKYYDNKLGNHIDITPDNSENQVILQSLKP

SEQ ID NO: 1589 - protein, 150 aa, Eubacterium dolichum
SVADETIYSTRVIDGKEKVVKKYKDIYDPKFTALAEDILNNAYQEKYLMALHDPQTFDQIVKVVNYYFEEMSKSEKYFTKDKKGRIKISGMNPLSLYRDEHGMLKKYSKKGDGPAITQMKYFDGVLGNHIDISAHYQVRDKKVVLQQISP

SEQ ID NO: 1590 - protein, 145 aa, Streptococcus macedonicus
KVSDATIYSTRKAKIGKDKKEETYVLGKIKDIYSQNGFDTFVKKYNKDKTQFLMYQKDPLTWENVIEVILGDYPTTKKSEDGKNDVKCNPFEEYRRENGLICKYSKKGKGTPIKSLKYYDKKLGNCIDITPEESRNKVILQSINP

SEQ ID NO: 1591 - protein, 144 aa, Turicibacter sp.
QVADATIYSTRQGIVKQTSGDKSFTLDSNSKEHYVIAKIKNIYEDVDAKRFMDRYKKDKTQFLMYHHDPQTFSILEDVMKTYPDKKNPFQAYRLEYGPIRKYSKKGNGPQIQSIKYYDSKLGQHIELKQANQSTKKVVLQSLNP

SEQ ID NO: 1592 - protein, 127 aa, Bacillus niameyensis
TMSNQTIYGTREKDGDTYYLGKVSNIYNLDKHGVEPLLKRLEKSPNSFLIAEHNPKLFELIQLIVKEYKNADNPFKAYYNDHGYVMKDGKVPVKTLRYRDRKLGVHMKITDKYPGAKSDVVLLSIKG

SEQ ID NO: 1593 - protein, 126 aa, Massilibacterium senegalense
QLMNDTICSTRTVDNNEYVIKKIKDIYAKDNTDLVNKIRKSPKKLLMYHNDRQTYEKIKSIMEQYGDAKNPLYKYKEETGEFVTKYSKKDNGPPILSVKYYSGKLGEHKDITHKFHNSKKRVVNLS

SEQ ID NO: 1594 - protein, 20 aa, Kurthia huakuii
EMFFDETLHSPKIKPAKYES

SEQ ID NO: 1595 - protein, 44 aa, Streptococcus equinus
GQNGGLFDNNILAKPEKDDKKKLFPIKNSLSTTSYGGYARATIA

SEQ ID NO: 1596 - protein, 37 aa, Streptococcus equi
GFYKESILSKGNSDKLIPRKNNWDTRKYGGFDSPTVA

SEQ ID NO: 1597 - protein, 37 aa, Enterococcus faecium
GFSKETVEPKKDSSKLLPRKNNWDPAKYGGLGSPNVA

SEQ ID NO: 1598 - protein, 37 aa, Enterococcus italicus
GFSKESIQPKGESQKLIRRKQQWNTKKYGGFDSPVVA

SEQ ID NO: 1599 - protein, 37 aa, Streptococcus agalactiae
NDTGEIVWDKKKHFATVRKVLSYPQNNIVKKTEIQTG

SEQ ID NO: 1600 - protein, 37 aa, Streptococcus ratti
GLTNETIYPRGSFDKLLNRKNTLEASKYGGFGSPTVA

SEQ ID NO: 1601 - protein, 37 aa, Listeria monocytogenes
EFSKATIKPKGNSSKLIPRKTNWDPMKYGGLDSPNMA

SEQ ID NO: 1602 - protein, 43 aa, Lactobacillus sp.
DLFDQTIYAAKDSKERGGRMSLIPKKLGYLTGIYGGYQTERGS

SEQ ID NO: 1603 - protein, 37 aa, Pediococcus acidilactici
ELFNQTVYPKNYRGKLIPIKEDRPTDLYGGYSGNTDA

SEQ ID NO: 1604 - protein, 35 aa, Acidaminococcus sp.
GLFDIQPLKASTGLVPRKAGLDVVKYGGYDKSTAA

SEQ ID NO: 1605 - protein, 42 aa, Lactobacillus sp.
GLFDVTIYPRGERDLAKTRKLIPKGNGLDPKIYGGYSGNSGA

SEQ ID NO: 1606 - protein, 63 aa, Treponema putidum
ELFNQTIMKKGLGQHPLKKECPFSNISKYGGYNKVSAAYYTFIEYEEKGNKIRSLETIPLYLE

SEQ ID NO: 1607 - protein, 113 aa, unidentified
PQRKLKAALHEDTYYSPPVERDGKLSVRCRKPVNSLSANEINAIVDPTVRETVRKAWEEVGRDSKKLLNNWPLLQTRRGDLVPIKRVRYYKTQQVQPIAAEDPARTRYVIPGG

SEQ ID NO: 1608 - protein, 222 aa, unidentified
SRRRLITKKRAYYKVLDPSTGAYILKKQEKPSPVVRGPLHDEQPLGEIKEYQKIKIKDAIKKLEENKNNLDKFINGTFPIEWQRKKINEKLSIYNNDPKLFLKNLNKDAILNLKGEKLEYITILVRKYVKSRDLNTSITLSQIENIIDRKLKNEIKNHLKQYNNDPKKAFTDEGLMLFNQNRKFPVYKVRCKVDESEVGTLTTREPLERDSENNPKLHIEKG

SEQ ID NO: 1609 - protein, 39 aa, unidentified
PRKKVTGQAHKETVISPKNKDHSMIEIHKGRGYAEQSLM

SEQ ID NO: 1610 - protein, 51 aa, Eubacterium sp.
LFKINPLKKGNGQVPLKASGARSCIEKYGGYDKATSAYFSYVEYTDKKGKA

SEQ ID NO: 1611 - protein, 111 aa, unidentified
PQRKVSGAIHADTIRSAKHISTDRVSVVKKPLNSLSENDLKNLFDTEHNKLLYSAIRQRMAEFDNKAQKAFAEPLFKPLRDGSPGPMVRSVKVCQAQYTGVNVRGGIADNG

SEQ ID NO: 1612 - protein, 122 aa, unidentified
PDHGITPGRARERQATSGQLHEDTAYGRVDEQVNGKTYNLVTRKPIGALTKNEIGQVRDVRIREALQEVAYEADRDGIKLGEALARFGEENGIRRVRVLKTDKTAIALTHGDGRFHKTYVPG

SEQ ID NO: 1613 - protein, 113 aa, unidentified
VSRKLSGPLHEETHFGDTGLEAVRRGTIYRQYVRRKPLHELSPKELDCIRDPAVQSIVRKWVNARGGDPKKAFSDGYPKLGTNGPEIKKVRLVVEKRPELTIHTGSGVVDKGK

SEQ ID NO: 1614 - protein, 116 aa, Bifidobacterium bombi
LRLGNGSAHKDTVVSMMTRKVGDELSITAINKAESGALYTALTRDSDFDWKTGLSANPNRRIRVHDKWFEADDTIKFLEPAVEVVLKNNTRARIDPEALDKVHSTLYVPVRGGIAE

SEQ ID NO: 1615 - protein, 55 aa, unidentified
PRRKVSGSAHKETVYSNKTHSVKKADGKVEYLKGNSVNNNVKLKHGIALNDSMPR

SEQ ID NO: 1616 - protein, 93 aa, Corynebacterium camporealensis
LRLGNGRAHEDTIGELKKIRVGDAISVTDIDRASTEALWCALTRDPDFDPKEGLPENPHRRIRIHGTWYDADDHIEVFPVGAGAIKVRGGYAE

SEQ ID NO: 1617 - protein, 72 aa, unidentified
PDHSHEGAMHNDTAYGLRDGGKVSFHKMVDGKRERTEESLKVIKISDAKAIERHGVLPTGEPKPYKGYKGDS

SEQ ID NO: 1618 - protein, 129 aa, unidentified
ALEAIVVSHRVRRKVNGPLHDETRLGDSGEPPIREGGKEYRFYVKRKALAQMSKGEIDAIRDERIRTLAQERLAAHDGDVKKAFATPLMLPGRAGKPDREVKKARVIVKSQPHLVTALNGGKAYAAASD

SEQ ID NO: 1619 - protein, 230 aa, Legionella pneumophila
YNKPNISSTPLFKDSLYAERFIPVWVKGETFAIGFSEKDLFEIKPSNKEKLFTLLKTYSTKNPGESLQELQAKSKAKWLYFPINKTLALEFLHHYFHKEIVTPDDTTVCHFINSLRYYTKKESITVKILKEPMPVLSVKFESSKKNVLGSFKHTIALPATKDWERLFNHPNFLALKANPAPNPKEFNEFIRKYFLSDNNPNSDIPNNGHNIKPQKHKAVRKVFSLPVIPG

SEQ ID NO: 1620 - protein, 114 aa, unidentified
AARKIAGALHEETAYGCRKDGRYVYRKPLNGLFKREHAKDIVDPQIKKIVLEHLDRHGNDPKKAFIPENLPLLKDGAGFRPIKKVRVFAKHRPTSVFAVRDRHGRDFKFLKYGS

SEQ ID NO: 1621 - protein, 214 aa, unidentified
AKNKVVTRNINKIKGSDKKQIALTPRGQMHKETVYGRIKQYNSKIEKVSAKFDEDTIAMVSNPQYRSLLLQRLKENGNDPKKAFTGKNALDKAPILLKNGTPLPDKVKLIWLEDNFTIRKEINPDLKIDKVIDEGIKRILQKRLDEFKGDPKKAFADLENNPIWLNKEKGIAIKRVTISGVKNAEALHTAKDHLGNKRLDKNGQEIPVDFVSTG

SEQ ID NO: 1622 - protein, 151 aa, unidentified
TNHRVVSTRLTITRSKGKVFRNKSSAARGALHKETVYGKRKLLDGSYKYHVRKSLEDIKEKAQVDKIVDQKIKDLVRNRLRELGVDITMKKYKVPPGAFFSKDENGQILPLIWLPNNRGGKVPVYSVRINEELGNAAQLKSSQNQYVNPRN

SEQ ID NO: 1623 - protein, 42 aa, Acidaminococcus intestini
SFDRKEGLFDIQPLKASTGLVPRKAGLDVVKYGGYDKSTAAY

SEQ ID NO: 1624 - protein, 45 aa, Coriobacterium glomerans
PFEDHGVFWDATIYSPRAKKTAALPLKQGLNPSRYGSFSREQFAY

SEQ ID NO: 1625 - protein, 45 aa, Eggerthella sp.
PMEDSGAFWDATIYSPKAGKKGALPVKQGLPVEKYGSYSREQFAY

SEQ ID NO: 1626 - protein, 50 aa, Finegoldia magna
SHVKKGELFNATIAGKKDYKKGKIYLPLKKDDRLQDVSKYGGYKAINGAF

SEQ ID NO: 1627 - protein, 50 aa, Lactobacillus rhamnosus
VYFETADLFKQTIYAAKDSKERGGSKQLIPKKQGYPTQVYGGYTRENTAY

SEQ ID NO: 1628 - protein, 189 aa, Mycoplasma gallisepticum
IENKTNISLFNDTVYSAKKVGYEDQIKRKNLKTLDIHESAEENKNSKVKKQFVYRKLVNVSLLNNDKLADLFAEKEDILMYRANPWVINLAEQIFNEYTENKKIKSQNVFEKYMLDLTKEFPEKFSEAFVKSMLRNKTAIIYNVEKKVVHRIKRLKILSSELKENKLSNVIIRSKNESGTKLSYQDTIN

SEQ ID NO: 1629 - protein, 47 aa, Streptococcus agalactiae
TEIQTGGFSKESILAHGNSDKLIPRKTKDIYLDPKKYGGFDSPIVAY

SEQ ID NO: 1630 - protein, 44 aa, Streptococcus dysgalactiae
TEVQTGALTNESIYARGSFDKLISRKHRFESSKYGGFGSPTVTY

SEQ ID NO: 1631 - protein, 47 aa, Streptococcus gallolyticus
VETQTGGFSKESILPKGNSDKLIPRKTKKFRWDTPKYGGFDSPNIAY

SEQ ID NO: 1632 - protein, 149 aa, Streptococcus gordonii
VDSKYNRKISDATIYATRKAKLDKEKKEYTYTLGKIKDIYALGTKTPSKTGFYKFLDLYKTDKSQFLMYQKDRKTWDEVIEKIIEQYRPFKEYDKNGKEVDFNPFEKYRIGNGPIRKYSKKGNGPEIKSLKYYDILLGKHKNITPDGSR

SEQ ID NO: 1633 - protein, 47 aa, Streptococcus mutans
VEEQTGGFSKESILPKGDSDKLIPRKTKKFYWDTKKYGGFDSPIVAY

SEQ ID NO: 1634 - protein, 150 aa, Streptococcus salivarius
VDSKFNRKISDATIYATRQAKVGKDKKDETYVLGKIKDIYSQTGYDAFIKIYKKDKSKFLMYRHDPQTFEKVIEPILENYPNKELNEKGKEVPCNPFLKYKEDHGYIRKYSKKGNGPEIKSLKYYDSKLGNHIDITPKNSNNKVVLQSVS

SEQ ID NO: 1635 - protein, 147 aa, Streptococcus suis
VDSKVNRKISDATIYATRNAQLGKDKTEGIYVLGKIKDIYTQAGYEAFLKRYTKDKTSFLMYHKDLDTWEKVIEIILRDYREYDEKGKEIGNPFERYRRENGYVKKYSRKGNGTAIKSLKYYDNKLGNHIDITPENSRNAVVLQSLK

SEQ ID NO: 1636 - protein, 151 aa, Streptococcus thermophilus
VDSKFNRKISDATIYATRQAKVGKDKKDETYVLGKIKDIYTQDGYDAFMKIYKKDKSKFLMYRHDPQTFEKVIEPILENYPNKEMNEKGKEVPCNPFLKYKEEHGYIRKYSKKGNGPEIKSLKYYDSKLLGNPIDITPENSKNKVVLQSLK

SEQ ID NO: 1637 - protein, 46 aa, Treponema denticola
QAACKKGELFNQTIMKKGLGQHPLKKEGPFSNISKYGGYNKVSAAY

SEQ ID NO: 1638 - protein, 44 aa, Lactobacillus animalis
AERQIGGFSDEMLVPKSDSGKLLPRKEGLDPVKYGGYAKAVESY

SEQ ID NO: 1639 - protein, 51 aa, Lactobacillus ceti
VKPITSPISNETLHKALKCKPGSYLPRKSSKGTPLADVTKYGGYEKIKNAY

SEQ ID NO: 1640 - protein, 60 aa, Tissierellia bacterium
LVEGKGQLFNLTIKDKTQLKKNVGNIVANTPISLKNRKLHLNSVEIAKKYGYFDSLNNAY

SEQ ID NO: 1641 - protein, 53 aa, Veillonella parvula
LLEQTGALADATIYKATVAGKAKDGAYIGMKTKSSVFADVSKYGGMTKIKNAY

SEQ ID NO: 1642 - protein, 164 aa, unidentified
KDNTVTKKVTMIIEKNGKKFRSEGQAVRGQLHKETVYGKRTPPRAEQAFHVRKPIESLNDKQLDKIVDDNVRSIVKYGREREKFIKEQIKALQKDRTKAGDEEEKKIDQQIKSLEEENRQLYTLPNKNGDRVPIKKVRIRENLGNTEMLKPSENINQYVNPRNN

SEQ ID NO: 1643 - protein, 44 aa, Enterococcus faecalis
VEVQKGGFSKESIKPKGPSNKLIPVKNGLDPQKYGGFDSPVVAY

SEQ ID NO: 1644 - protein, 151 aa, Streptococcus gallolyticus
KQFNKNPEKFLMYQNDPKTFEKLSIIMKQYSDEKNPLAKYYEETGEYLTKYSKKNNGPIVKKIKLLGNKVGNHLDVTNKYENSTKKLVKLSIKNYRFDVYLTEKGYKFVTIAYLNVFKKDNYYYIPKDKYQELKEKKKIKDTDQFIASFYK

SEQ ID NO: 1645 - protein, 135 aa, Staphylococcus pasteuri
TGEILSVSDDEYKELVFQPPYQGFVNMISSKGFEDEILFSYQVDSKYNRKVSDATIYSTRKAKIGKDKKEETYVLGKIKDIYSQNGFDTFIKKYNKDKTQFLMYQKDPLTWENVIEVILRDYPTTKKSEDGKNDV

SEQ ID NO: 1646 - protein, 254 aa, Prevotella histicola
TRKMISPDLKIDKVIDKGIREILRTRLAKFNGDAQKAFSNLDENPIYKDEAKKITLKRVSLEGVSSVIPLHKLKDMGGKPVVGKDGKPVWGDYVQTSNNHHIAFYMDENGNLQDDVVTFFKAARRKSQGVPVIDKNYNHDKGWHFLFTMKQNEYFVFPNEATGFIPTEVDLMDEANYDMISPNLYRVQKMSKTKQGITDKRDYWFRHHLETVLNNDLKVRNSIFKQINSLKPLEGIVKVRINAIGKIVAIGEYD

SEQ ID NO: 1647 - protein, 256 aa, Chryseobacterium gallinarum
IRKSVTPDNFKDYKNLEKITDLGIKKILKERLDQFKGNAKEAFSNLDKDPIWLNEEKGIAIKTVTITGVSNAESLHFKKDHLGKEILDENGNKIPGDFVSTGNNHHLAIYLDEEEKLDDKMVTFYEAVLRVNQGLPVIDKDYNKEKGYKFLMTLKQNEMFVFPNEDFDPNEIDLLDERNLERISKHLFRVQKISKVGYGNSFVRDFVFRHHLETTVEERKELRNITYIQLKSLEGLRNIIKVRLNHLGKIVQIGEY

SEQ ID NO: 1648 - protein, 269 aa, Parabacteroides sp.
IRKPVDPALNVDKVVDVKVRAILERRLKEYGGDPKKAFVNFWENPIWLNKEKGISIKRVSIRGINNAQSIHVKKDKNGNPIWDENGKQIPVDFVNTGNNHHVAIYRKPVLDKKGQVTFDEDGNLMYELDEVVVPFFEAVTRANLGLPIIDKDYRKSEGWQFLFSMKQNEYFVFPNEKTGFNPKEVDLLNPDNYAMISPNLFRVQTMSKVMYGNNVVRDYKFRHHLETTVKDMKELKDIAYKQYKTLSFGNSVVKIRINHIGQIVSVGEY

SEQ ID NO: 1649 - protein, 258 aa, Capnocytophaga canis
IRKDITPENFKDEKLIDKILDEGVKRILKERLQSFGNDAKKAFSDLDKNPIWLNKEKGIAIKRVTISGVANAEPLHTKKDHLGKEILDKEGKPIPVDFISTGSNHHVAVYRDEKGNLQEKVVSVFEAVVRANQGLPIIDKTYNQHLGWEFLFTMKQNEMFVFPNESTGFNPNDIDLLDPKNKRIISPNLFRVQTISVVKYGNAIVRDFKFRHHLETTVEDKKELQGKTYQQIKSLSPLNDIIKVRINHLGDIVSVGEY

SEQ ID NO: 1650 - protein, 267 aa, Ornithobacterium rhinotracheale
SSSRQLIDESFTPKKIGKVLDPTIRNILLKHLNSTKYNNKFDSDGNPIKPEKLAFSPEGLKDLNKNIKHLNNNKEHQPIKRVKLFETLGNKIKVGYTQQKNKKFAETATGTNLFLGIYSDNNKRDFKTIPLILAIQREKEGLNPCPDTDEKGNQLLFSLSPNELVFVPNNEERKNPNLVDFENLSKDQIDRIYKFVSCTGSEAYFVPSRTAKPIIENENGTNNKSQRIIEFNEKTSIKNEKNEPVLIKTICWKIEVNRLGKIIKVIK

SEQ ID NO: 1651 - protein, 232 aa, Weeksella virosa
TATRKSLDTSFNAKTILSITDTGIQKILLNYLKAKGNPELAFSPEGIEEMNQNISLYNDGKPHQPILKVRVFEQGSKFPLGETGNKTTKYVEAAKGTNLFFGVYEDNQGKRSYDTIPLNIVIERQKQGLNSVPETNEKGHRLLFSLSPNDLVYVPIEGEVFDETNPDVNRIYKVVSFSGSQMFCVRQDVATSIVYKLEFSSLNKMERTIDGIMIKEICIKLKVDRLGNISKA

SEQ ID NO: 1652 - protein, 245 aa, Flavobacterium frigidarium
IRKDITPDNFKDLKSIAKVMDSGLKTILENRLAEYGNDPKKAFSNLDENPIWQNKEKGIAIKRVTISGVSNAQALHTKKDHLGNEILDQEGKPMPVDFVSTGNNHHVAIYRDEKGNLQEEVVSFYDAVIRRNLGLSVINKNHEKGWDFLFSMKQNEFFIFPSDSFNPHEMDLQNPTNYHLISRYIFRVQKIATKDYTFRHHLETTVEDKKELKDISSKRLGLNGINDIVKIRINHLGKIVQIGEY

SEQ ID NO: 1653 - protein, 18 aa, Rikenellaceae sp.
DVSVKEYKRYYHVVNDGN

SEQ ID NO: 1654 - protein, 292 aa, Jejuia pallidilutea
PVIRNLVEEQKKNTIVKDYQGNVIRHIRIRTKSGREVKERINYRSRYDYKNKFYSEAGKIPYAVLLQKSINGEIEREMIPVASFEVAKVFKKHRKFNPELYMNEFHPDIGNWDKKNWLKVGQKVIVLKNDKEFEKRDDIDFQHKRMYVITQFSDGGIWLQYHLNAQSKDDVKKSISLAKDKLLRKYEIQYNIPEVIEDESIQDRKNRTADYNNRRFRFDTISKSFRLTTLMETIGEKRTKKIKAELDKYKAIPSSIEIEGETALLKMSKENWNYLYEGTDFEVTILGKLNWL

SEQ ID NO: 1655 - protein, 339 aa, Caenispirillum salinarum
KEICTEIADRHDRVVDPEGTHARRWISARLAALVPAHAEAVARDIAELADLDALADADRTPEQEARRSALRQSPYLGRAISAKKADGRARAREQEILTRALLDPHWGPRGLRHLIMREARAPSLVRIRANKTDAFGRPVPDAAVWVKTDGNAVSQLWRLTSVVTDDGRRIPLPKPIEKRIEISNLEYARLNGLDEGAGVTGNNAPPRPLRQDIDRLTPLWRDHGTAPGGYLGTAVGELEDKARSALRGKAMRQTLTDAGITAEAGWRLDSEGAVCDLEVAKGDTVKKDGKTYKVGVITQGIFGMPVDAAGSAPRTPEDCEKFEEQYGIKPWKAKGIPLA

SEQ ID NO: 1656 - protein, 136 aa, Salinispora pacifica
NPRNNYAFIIYRDSDGNYKEHPVTFWDAVQARLAGKSVYQLPEPGKIITTLHINDTFLLGLGDEQLQGDLPQELVSRHLYRVQKLSSMYYCFRLHTESTLDRDFEPYYLGIQSFKAWKEQNPLRVKVATTGEVNLE

SEQ ID NO: 1657 - protein, 145 aa, Sulfitobacter donghicola
TARISVPHNAPIKAYKGGSNHAFEIWRLPNGKIESQVITTWEHHNLTEPKRPHPAAKRIIRLHKTDMVAIERDGKTVICFVQKTDPSNGAFLVPHFEANADGRKRKNEPVEWYQMSANSLIKADLRRVGVDEMGRVRDPGPPPIR

SEQ ID NO: 1658 - protein, 149 aa, Mucispirillum schaedleri
VIKIKDKSGRDYKAFAGGNNICVEIYEVDGVRKSEVIQLFDAAQKGFMPEWMKKYPNGKLLMRLFKGDVIGFIENRKYNYYTIKGISIADQNLKLLAINKAEGIFKKGLNILFDSNNKNSLNAKQFNISVTGIVTKKKTADVNFWKNRK

SEQ ID NO: 1659 - protein, 172 aa, Mesorhizobium sp.
ALDTFAKAQGMRRIRVGKEDMSAVTIHDRQTDKAYKAVAPGENHHVDVVQMRDGAWKGFAVTVFEANQKDFRPQWEREKLGGKLVMRLHKGDAVELESSGVRLVKFVQQIWMKSNLVLLTEHNEGGDLQKRHQDADDPFRWDFANIGKLKERGCVAVKVDELGRVTKRISNT

SEQ ID NO: 1660 - protein, 132 aa, Neisseria meningitidis
MVRVDVFCKVDKKGKNQYFIVPIYAWQVAENILPDIDCKGYRIDDSYTFCFSLHKYDLIAFQKDEKSKVEFAYYINCDSSNGRFYLAWHDKGSKEQQFRISTQNLVLIQKYQVNELGKEIRPCRLKKRPPVR

SEQ ID NO: 1661 - protein, 162 aa, Geobacillus sp.
IVRIDVFEKDGKYYCVPVYTMDIMKGVLPNKAIEPNKPYSEWKEMTEDYTFRFSLYPNDLIRIELPREKTVKTAAGEEINIKDMFVYYKTIDSANGGLELISHDNSFSLRGVGSRTLKRFEKYQVDVLGNIYKVRGEKRVGLASSAHSKTGETIRPLQSTRD

SEQ ID NO: 1662 - protein, 142 aa, Bacillus okhensis
LIRIDFFQKEGKFFMVPLYTYDTIQSDLPNRYVVSGKGYQLWPQLTNEHKFIQSVHPYELLRVVKRSGDDRFLYLASINISNNVLKFIEPNFPHNDYIEISLGTIKHMEKYDVNVLGQVSLKATGPRLGFNNMKAQKNKVKG

SEQ ID NO: 1663 - protein, 149 aa, Tistrella mobilis
VRIDVFTRPNRKGRDEWYLVPIYPHQVMNRKAWPHPPMRSVVAYKDEAGWTEIGAEHSFRFSLYPRSYVQLVKSNGDVIEGYLVSMDRSTGAFRVFVHNNPAEMAKGIGAKTLLNLRKFNVDRFGVRTEVKSEVRTWHGEVCTSPVPPD

SEQ ID NO: 1664 - protein, 136 aa, Kingella kingae
MVRVDVFEKSGKFYLVPIYAWQVAEGILPNYAVVAHKDESDWILMDESYHFKFALYKNDLLEVQTKKGGIMGYFASLDRATGAITIREHDRDKKKCKDGEHRSIGVKMASSFKKLQVDELGKNIHETRSRKRPNIG

SEQ ID NO: 1665 - protein, 227 aa, Clostridium perfringens
IYSERAFKDGYFVSKKSLVDLKRGDLDNFYNYECDKKLYDAISERMKEFNYNGKKAFESPFRKPTKSGKEGPVVRSVKIKSAVPFKDGIPMNEGLVAKEGMVRIDIYEKEGKYFVVPVYRYQLAKGIVPKRAAIAKKDELKWPIMDQTYNFKFSIYKNDLIEVKYDKKGVYFGYYDGFDRNSASLTIEKHDNSERYRSIGLKVGVLEINKYEVDVLGNYHKVKLGGN

SEQ ID NO: 1666 - protein, 138 aa, Neisseria sp.
MVRADVYQKADKKGKRQYFIVPVYAWQVEKNELPTVDCKGYEIDDTYEFCFSLYKYDIIEIQNPDNMSKELRVYYINCDSSDGRFWLAHHDKSAKEQQFRISTQNQPIIKKYQVDPLGKEIRLCKAEKRTELNGKKKK

SEQ ID NO: 1667 - protein, 164 aa, Campylobacter coli
MVRIDIFKKQNKFYAIPIYTMDFALGVLPNKIVIAGKDKKGNPKQWQEIDESYEFCFSLHKDDLVLIQKKDMQEPEFAYYNSFDIGNSSICVEKHDNKFENLTDNQKLLFVNAKEGSVKAEKLGIQGLKIFEKYIITPLGEKIKADFKPREDIALKTSKKHGIR

SEQ ID NO: 1668 - protein, 195 aa, Sulfurospirillum sp.
YNSSTIPRVDIYKKDDKYHVVPIYLSDMTKAEVPNKSLGTNPEGMDEKYFCFSVFKNDLIELETKATPKKPSKKLLGYFKQLNGANFILNSIHNGIIDGFVCSPITLFKQQKDMCKKCLPEDRAIGNCSQETLEFWEAENIKVPKKDFECDQGIKFAIAVRKYTIDPLGYYHEVKGEKLLGTIPQGAKKHPKRQK

SEQ ID NO: 1669 - protein, 134 aa, Dechloromonas denitrificans
MLRVDVFTKGGKFHLVPVYVHHRVTGLPNRAIIAFKDEDEWTLIDDSFDWCFSLYPNDLLRIKLKKESHSGYYSSCNRSTGAVNLWAHDRNVNVGKDGFIESIGVKMAVSIEKLHVDTLGNIYPAPPEKRRGLA

SEQ ID NO: 1670 - protein, 170 aa, Nitratifractor salsuginis
MRFVYDKLNAMQIDRGLVETDKNMLGIHISKGPNEKLIFRRMDVNNAHELQKERSGILCYLNEMLFIFNKKGLIHYGCLRSYLEKGQGSKYIALFNPRFPANPKAQPSKFTSDSKIKQVGIGSATGIIKAHLDLDGHVRSYEVFGTLPEGSIEWFKEESGYGRVEDDPHH

SEQ ID NO: 1671 - protein, 161 aa, Enterococcus cecorum
WRTDVYYNRSQNSYHIMGIKYSDLRYIDGKYGIPKNVYEKIKLREKIPSESEFCFSLYKNDRVKIIDPNKNEEIELRFNSRTLPSVLNYVEFKPLFQESYNSLTLLPVFSKTTSEGRIIKKFTREDNIVYKVNTDELGNPYYILKESQNPKNIIDNSNKTE

SEQ ID NO: 1672 - protein, 151 aa, Facklamia hominis
WRTDVYYNSVNNCYELLGIKYCHLKFYRGKYGIPKSIYDELKKEDEISSESVFKFSLYRHDRVRFEKDGEYIEALFGSKNESNKNYLELSPIDKNKWLSKENVKFFGEVAASGRFIKGLKPGIKVIKQSTDYMGHVYAIHQEKLKFVLSDA

SEQ ID NO: 1673 - protein, 156 aa, Streptococcus sinensis
WRTDVYFNHKTKIYELMGLKYSDLSFEKGSGKYRISLDKYNVIKKKEGVHKESEFKFTLYKNDLILIKDLEKSEQQLFRYNSRNDTSKHYVELKPYDKAKFEGNQPLMALFGNVAKGGQCLKGLNKANISIYKVQTDVLGNKRFIKKEGDAPKLEF

SEQ ID NO: 1674 - protein, 158 aa, Eubacterium dolichum
YRTDFYYSKENGYKFVTIRYKDVRWSEKKKKYVIDQQDYAMKKAEKKIDDTYEFQFSMHRDELIGITKAEGEALIYPDETWHNFNFFFHAGETPEILKFTATNNDKSNKIEVKPIHCYCKMRLMPTISKKIVRIDKYATDVVGNLYKVKKNTLKFEFD

SEQ ID NO: 1675 - protein, 162 aa, Streptococcus macedonicus
WRADVYFNPETLKYELMGLKYSDLSFEKGTGNYHISQEKYDAIKEKEGIGKKSEFKFTLYRNDLILIKDIASGEQEIYRFLSRTMPNVNHYVELKPYDKEKFDNVQELVEALGEADKVGRCIKGLNKPNISIYKVRTDVLGNKYFVKKEGDKPKLDFKNNKK

SEQ ID NO: 1676 - protein, 157 aa, Turicibacter sp.
WRCDIYYNKKDKRYIAAGLKYADLSYQKGTGLYGISLQRYQQILNSEKIELSIEQIELLLEGRLNESNFEFCFSLYKNDFIQWNDENNQTFQYRFLARNLSSPNRIEVKPINKSKYDKQAEGLKTLKKGLNRFYKISVDVLGYQHFIKKEKLKLTFK

SEQ ID NO: 1677 - protein, 138 aa, Bacillus niameyensis
VRVDLYKNAEGKYKYLGVPYHWFKQQGNKYVLDMEKYNEEKMKDYKKIDDTFEFQMSLYKNDLFSFERKEGSYFRIFRGDAMPRDNKIEVDFIDKKKQDRKDGFLSPSTFKNIVKYNVDVLGNTYKVEKENFKNTLQL

SEQ ID NO: 1678 - protein, 150 aa, Massilibacterium senegalense
IKPFRMDVYKEDGIYKFVTVRFNDLKEKGDNYEICKKIYEEKLKKKKINNKSNFLFSLNKYDIFELDNEEFLFIGVNHDKTNRIECNWINQNYKNFAELNNLKNKQLRKSISKNIIQFEKFATDVLGNRYKVTNEKLIFSYPKKSMRGVR

SEQ ID NO: 1679 - protein, 219 aa, Kurthia huakuii
NKTNLSVHDSVKSSAVIVVKLMEQTKKQIVEKIDLIQLSVLEDKQWQHLSNDEKALKLASRKYSTKKIIAATWIMKLSKYQKFMWNNQMFYLASMKERHLATQFIVPKELLMAYLQANEQTSVAKLQTIYATIAEEMFKQYPIYREGNMPKKVAEFTKDIQNFEQMTKQVTEIFKATANNATRSDSLGSRLSKVMKAAEIKVVYESITGLKVRKPKELY

SEQ ID NO: 1680 - protein, 219 aa, Streptococcus equinus
YSILIVSESRERKELKLLGLPLLDKVKYEKNPTAYLNGIGIVNIKNIFKLSKYCLLEFKEKSITYHRYMVSNQELKRANQLSLTCKETELIYTYIKSGEDNIQLDGNEKVILSLWNKMIAFMEQTKLIDKKLFVSLKELKDEVNLINILDIASKSIDFTKISAGQKKIVLNDSLSLPIKRWQFKSDEKMLKQLNDATLIHQSVTGLYETRIDLSKLGEE

SEQ ID NO: 1681 - protein, 228 aa, Streptococcus equi
YSVLVIAKMEKGKAKVLKPVKEMVGITIMERTAFEENPVVFLEARGYREIQEHLIIKLPKYSLFELENGRRRLLASASELQKGNELFLPVDYMTFLYLAAHYHELTGSSEDVLRKKYFVDRHLHYFDDIIQMINDFAERHILASSNLEKINHTYHNNSDLPVNERAENIINVFTFVALGAPAAFKFFDATIDRKRYTSTKEVLNATLIHQSVTGLYETRIDLSQLGEN

SEQ ID NO: 1682 - protein, 213 aa, Enterococcus faecium
YTVAFTYEKGKARKRTNALEGITIMEREAFEQSPVLFLKNKGYEQAEIEMKLPKYALFELENGRKRMVASNKEAQKANSFLLPEHLVTLLYHAKQYDEISHKESFDYVNEHHKEFSEVFARVLEFAGKYTLAEKNIEKLEKIYKENQTDDLAKLASSFVNLMQFNAMGAPADFKFFDVTIPRKRYTSLTEIWQSTIIHQSITGLYETRIRMGK

SEQ ID NO: 1683 - protein, 215 aa, Enterococcus italicus
YAILLSFDKGKRKARSFKIVGITIQDRESFEGNPILYLSKKDYHNPKVEAILPKYSLFEFENGRRRMVASASETQKGNQLIIPGHLMELLYHSKKIINGKNSDSVSYIQNNKEKFREIFEYIVDFSSKYISADANLNKIEKIFENNFHKASEQEIAKSFINLLTFTAMGAPADFEFFGEKIPRKRYVSISEIIDAVFIHQSITGLYETRVRLTEV

SEQ ID NO: 1684 - protein, 215 aa, Streptococcus agalactiae
GFSKESILAHGNSDKLIPRKTKDIYLDPKKYGGFDSPIVAYSVLVVADIKKGKAQKLKTVTELLGITIMERSRFEKNPSAFLESKGYLNIRADKLIILPKYSLFELENGRRRLLASAGELQKGNELALPTQFMKFLYLASRYNESKGKPEEIEKKQEFVNQHVSYFDDILQLINDFSKRVILADANLEKINKLYQDNKENISVDELANNIINLFT

SEQ ID NO: 1685 - protein, 232 aa, Streptococcus ratti
YCVLVVADSKNENGKVKKLKLGSELLGITILEKNDFENNSLDFLSRKGYQGVQEKKIIKLPKYSLFEFQDGSRRMLSSVMANDNKRGDLQKANEMILPAYLVKLLYHAKHINSVGEPAHKNYINEHCSEFQDLLNYIRQFADKFVDVDKNLSKIRSLSKSMAEYSVSEICSSFVNLLTLTALGAPADFKFFGTTIPRKRYGSPQSILSATLIHQSITGLYETRIDLSKLGED

SEQ ID NO: 1686 - protein, 213 aa, Listeria monocytogenes
YAVVIEYAKGKNKLVFEKKIIRVTIMERKAFEKDEKAFLEEQGYRQPKVLAKLPKYTLYECEEGRRRMLASANEAQKGNQQVLPNHLVTLLHHAANCEASDGKSLDYIESNREMFAELLAHVSEFAKRYTLAEANLNKINQLFEQNKEGDIKAIARSFVDLMAFNAMGAPASFKFFETTIERKRYNNLKELLSSTIIYQSITGLYESRKRLDD

SEQ ID NO: 1687 - protein, 241 aa, Lactobacillus sp. [sequence omitted]

SEQ ID NO: 1688 - protein, 241 aa, Pediococcus acidilactici
YLAIVALEDKKKGKYFKVVGIPTRAAAKLEKLKQQDSQQYLQALHKVIAPQFTKSTKKGIKKTEFEIVLDKVHYRQLVQDGPVKMMLGSSTYKYNAKQLVLSEKALQVIADDRKFDETQKDDNLIAVYDEILSIVNQSFDLYDINGFRKKLNDNRDQFIDLPAETKYEGRKVVAHGKREMILEILKGLHANAAFGNLKPIGFSTAFGQLQVPNGIILSKNAILIHQSPSGLFERKIKLSDL

SEQ ID NO: 1689 - protein, 255 aa, Acidaminococcus sp.
YYLLVRFTLEDKKTQHKLMMIPVEGLYKARIDHDKEFLTDYAQTTISEILQKDKQKVINIMFPMGTRHIKLNSMISIDGFYLSIGGKSSKGKSVLCHAMVPLIVPHKIECYIKAMESFARKFKENNKLRIVEKFDKITVEDNLNLYELFLQKLQHNPYNKFFSTQFDVLTNGRSTFTKLSPEEQVQTLLNILSIFKTCRSSGCDLKSINGSAQAARIMISADLTGLSKKYSDIRLVEQSASGLFVSKSQNLLEYL

SEQ ID NO: 1690 - protein, 228 aa, Lactobacillus sp.
YMVIVKIEQAKKSIYKVIGVPMRTLASLNQAKKQGNYQGELHKVLEPQIMFDNKGKPKRGVKGFRVIKDHVPFKQVVLDGDKKFMLYSDQYEANAKQLTLSQETMRIVTDNLKKGEDQDQLLVEAYDEILQKVDQYLPLFDMKGFRNGLHKGRDKFIELSTNDKKSTLSNILNGLHDNMVEIKMEYLGIRTPFGRLQSSSGINLSPDAVLIYQSPTGLFEKRVKIADL

SEQ ID NO: 1691 - protein, 236 aa, Treponema putidum
KDIQKSQDGLKGYLTDQLGKKEIKILVPKIKINSLLKINGFPCHITGKTGASFVLRPAVQFCCSNDEVLYFKKIIRFNEIRSQREKMGKTISPYEDLSFRSYIKENLCKKTKNDEIGEKEFYGFLQKKNLEIYDMLLIKHKDTIYSKRPNSTTLDMLIKGRYEFINLKPEDQIRVMLEILKLFCTTREVIDLGLIKGKSEAGVTTLGKKISNLDSCILIYQSITGIFEKRIDLLKI

SEQ ID NO: 1692 - protein, 134 aa, unidentified
NHHMEIWAVLDRSTGKPIKWASETISVLEAHRRYRQGSPIIQRDHGPDTRFCFSLSEGDLVKTRRSERDSERIWYVRSVKADGRVVMSPATDARKKEDISKSGELWQVSVNPLMRLGAAKVVVTPLGKVIYAHD

SEQ ID NO: 1693 - protein, 154 aa, unidentified
ENYGFVIYENKETGKREYETISFYDAISLARMGLSIVEARPGYRHCVLKHNELIYVLRPGEEKKLINWNDYKNLNNRIYRIVKFTNKRLYAVPHQVAENIVLNEEYENFNEFGSNKNCLEIISDDEPKTKISERCIKINADRLGNIKPAPWEND

SEQ ID NO: 1694 - protein, 142 aa, unidentified
PRVDVFKKGGKFYYVPIYVADFAKKELPNKIITIGKEKNEWNVADDSYEFLFSLFKDDLIKFKQKGKAEVMGYFLNIGISNCQITYQNINGSKEKNSKGKEFDPYFGGTTLEYIKKYQIDPLGFYYEIKKERRLPVSMKKNN

SEQ ID NO: 1695 - protein, 215 aa, Eubacterium sp.
VRQMFPVNLYEVKEYEADMQGFVTSRIAEASNVKILIPCVKYDACISFDGCRMFITKKTGNRIGYKPGMQLVLGYKYEKYIRNIENYLTKHKDREIIPRDNISAEENIELYDILTGKMLNTVLSVKFSGIGKKLEKRREKFVLCSPEEQCCVLNEILKILHANVLSGDLSLIGESPNTGTMKTNAKFSEIKDVHSIKLINQSVTGLFEQEIDLLK

SEQ ID NO: 1696 - protein, 147 aa, unidentified
DMVRTDVFRKQNKKGKWEYYLIPVYTVDMISGKLPDKAIAAHKPYNEWPVIDNEYEFLFTLYPYDLIRVETKDGGGLYYYRSSHRANGSLIVCNVNKADTTFGIGSRTAISIEKLEMGVLGDYFPVHKEIRRGLENGSHLEPDKIES

SEQ ID NO: 1697 - protein, 130 aa, unidentified
DNHRLEIFVAPDGNWTGEAVTVFDANRKDFTPAWQSMTPRPALIMRLHKGDLLEADFGEGRCIWRVVRLEPSAKRVRLVRDFDAGAYEERHKDAEDPFRWNFASYARLQAAAATRVRVDPIGRVLPAREH

SEQ ID NO: 1698 - protein, 118 aa, unidentified
NHHLAVYRNEEGKLLFRIVSLNEARTALAELGHPVAKTEASAKLLFSLSAGDCLSIPDGDETKLWIVSSTWAEGRVTISETHDAAGQTKTNPSILALVRKGALKVSVDPIGRVRPARD

SEQ ID NO: 1699 - protein, 214 aa, Bifidobacterium bombi
AGNSIHHVRFYKIPKLNSKGKQTGSIYAMLRVLTIDLAMNQYDKETGKKQDLFTLPLPESSLSRRFSEPKLRQALIDGTAEYLGWAVVDDELEIPAFANARITEEQAINGSFTDRLLHSFPGTHKFRFAGFSRNTEIAIRPVQLASEGLIETDENRKRQQLRLTQPNTEYSNSIKNVLKSGLHLKVNTLFQTGILVTRANSQGKQSIRFSTVEE

SEQ ID NO: 1700 - protein, 135 aa, unidentified
VDLFQNKKTNKYYLVPIYVSDFVQETLPNKAIVAGNKPWLEMDEEYEFKFSFYKSDLIEVKTKKTATKESVQVLGYFNTAVSSTAQVVIDTHDGNEEYRYGTQNLIFVKKYQVDALGNYIEVKNEKRQGTKKQNR

SEQ ID NO: 1701 - protein, 182 aa, Corynebacterium camporealensis
LSRFHHARVYKITSGKKPTYAMLRVYTTDLTAYRNEDLFSVEIKPQTMSMRQAEPKLRKAIAEGQAEYLGWIVIDDELLIDTSSFNSGQIAEMQAEFGMVRRWRLDGFVSPSKLRLRPLQMSGEGLAPGASAGSRKIVDQPGWRPAVNKLLSAGNVTIIRRNSLGQVRLNSNAHLPTTWKVD

SEQ ID NO: 1702 - protein, 134 aa, unidentified
NYCIEIVRNEKGKWEGEVISTFDAYQLVRQHGIERLRHPSLSVSGKPLAMRLMKNDCVKLQLDNEIITSRVCWVRTDTRIAFAPVSEANVDARDRDKGDQFSYIIKTASVLQKLCARQITITPIGELHDPGFKV

SEQ ID NO: 1703 - protein, 120 aa, unidentified
NHHMAIYRSIDGKVSYRTVSRIEAARRTARKEPVVQRVLPDGAQLLFTLTPGTTLAFPNNNGRPIYRVVTSVWDSGQIVLVDHTEAGGTVWKRPNASSLVAMGAKKVSVDPIGRVRPARD

SEQ ID NO: 1704 - protein, 188 aa, Legionella pneumophila
NAGTMMRIRRKDNKGQPLYQLQTIDDTPSMGIQINEDRLVKQEVLMDAYKTRNLSTIDGINNSEGQAYATFDNWLTLPVSTFKPEIIKLEMKPHSKTRRYIRITQSLADFIKTIDEALMIKPSDSIDDPLNMPNEIVCKNKLFGNELKPRDGKMKIVSTGKIVTYEFESDSTPQWIQTLYVTQLKKQP

SEQ ID NO: 1705 - protein, 124 aa, unidentified
NHHLEILENPSTGKREMRFVTTMEAAVRARRKNVPVYDRSAPAGWRFLMSLGINDMVEVNQDGGTDYYRVQKLDGGNRRFYLRHHASATTEAREEGLVVSTKSLPLIVRKLSVDPIGQISTAND

SEQ ID NO: 1706 - protein, 146 aa, unidentified
NNHHVAIYEDEKGNLHEKVVSFYEAVARVNQGLPIIDKSYNKDLGWKFLFTMKQNEMFVFPSNDFNPKEIDLLDKKNQALISKYLFRVQKFSEKDYNFRHHLETQIIDTPQLNNIIAIRKRNPNSLKGVIKIRINHVGDIIQIGEY

SEQ ID NO: 1707 - protein, 127 aa, unidentified
NHHILIYKSKNGILKEDIISFWVAAERIRQKSPVYQIPADCEEIIAILRKNDMFLIGWDISIPENSTEILSRHLYRVDNLSSLDYVFKHHLTDNDEEKVRIQSFKKWQELNPIKVRISSTGKVIGLV

SEQ ID NO: 1708 - protein, 254 aa, Acidaminococcus intestini
YLLVRFTLEDKKTQHKLMMIPVEGLYKARIDHDKEFLTDYAQTTISEILQKDKQKVINIMFPMGTRHIKLNSMISIDGFYLSIGGKSSKGKSVLCHAMVPLIVPHKIECYIKAMESFARKFKENNKLRIVEKFDKITVEDNLNLYELFLQKLQHNPYNKFFSTQFDVLTNGRSTFTKLSPEEQVQTLLNILSIFKTCRSSGCDLKSINGSAQAARIMISADLTGLSKKYSDIRLVEQSASGLFVSKSQNLLEYL

SEQ ID NO: 1709 - protein, 215 aa, Coriobacterium glomerans
FFIYKARNPRKEQTLFEFAQVPVRLSAQIRQDENALERYARELAKDQGLEFIRIERSKILKNQLIEIDGDRLCITGKEEVRNACELAFAQDEMRVIRMLVSEKPVSRECVISLFNRILLHGDQASRRLSKQLKLALLSEAFSEASDNVQRNVVLGLIAIFNGSTNMVNLSDIGGSKFAGNVRIKYKKELASPKVNVHLIDQSVTGMFERRTKIGL

SEQ ID NO: 1710 - protein, 215 aa, Eggerthella sp.
FFVYKAYNPKKKAYRLEFEAVPVRVASAVETRENALEEYAKSVAKQAGLEFVEVARPKVYKYQLIELGEDRLYITGKREVRNASQLAFSLDEIDLLKRLAEGEETSSEERERLFDVLIEKYARYAPRLARQLSVDSMSATFETLNAEEQLGILLSLVEIANGKRNMIDLSSAGGSKNAGCMNPTFSSELSSPGSNFTFIDQSVTGMFERRQRLEL

SEQ ID NO: 1711 - protein, 219 aa, Finegoldia magna
FFLVEHTKSKKRIRSIELFPLHLLSKFYEDKNTVLDYAINVLQLQDPKIIIDKINYRTEIIIDNFSYLISTKSNDGSITVKPNEQMYWRVDEISNLKKIENKYKKDAILTEEDRKIMESYIDKIYQQFKAGKYKNRRTTDTIIEKYEIIDLDTLDNKQLYQLLVAFISLSYKTSNNAVDFTVIGLGTECGKPRITNLPDNTYLVYKSITGIYEKRIRIK

SEQ ID NO: 1712 - protein, 236 aa, Lactobacillus rhamnosus
LAVVKTVEKKADVYRVVRIATSQVAALKEARAQSTVKERELLKKFLTTKFTKIGKNGKKAITPFDIVIPRVPREQLFHNKRYGFFMVNSDTLMHNYQELWMSRSDQQILSKLVKSAKTVENGQVGRLFENIVEQINKYFPLYDINQFRKKLDQSKDIFSKLPLEGNGTTSGKRETIQNILTGAGTGAKNGDLKNLGIKTPFGFLQVPSGIVLDDDTTLIYQSPTGMLNRIVRLSEL

SEQ ID NO: 1713 - protein, 167 aa, Mycoplasma gallisepticum
SIALMIMRSIDPTAKKQYIRVPLNTLNLHLGDQDFDLHNIDAYLKKPKFVKYLKANEIGDEYKPWRVLTSGTLLIHKKDKKLMYISSFQNLKDVIEIKNLIETEYKENDDSDPKKKKKANRFLMTLSTILNDYILLDAKDNFDILGLSKNRIDEILNSKLGLDKITK

SEQ ID NO: 1714 - protein, 228 aa, Streptococcus agalactiae
SVLVVADIKKGKAQKLKTVTELLGITIMERSRFEKNPSAFLESKGYLNIRDDKLMILPKYSLFELENGRRRLLASAGELQKGNELALPTQFMKFLYLASRYNESKGKPEEIEKKQEFVNQHVSYFDDILQLINDFSKRVILADANLEKINKLYQDNKENIPVDELANNIINLFTFTSLGAPAAFKFFDKIVDRKRYTSTKEVLNSTLIHQSITGLYETRIDLGKLGED

SEQ ID NO: 1715 - protein, 231 aa, Streptococcus dysgalactiae
SVLVVAKSKVQDGKVKKIKTGKELIGITLLDKLVFEKNPLKFIEDKGYGNVQIDKCIKLPKYSLFEFENGTRRMLASVMANNNSRGDLQKANEMFLPAKLVTLLYHAHKIESSKELEHEAYILDHYNDLYQLLSYIERFASLYVDVEKNISKVKELFSNIESYSISEICSSVINLLTLTASGAPADFKFLGTTIPRKRYGSPQSILSSTLIHQSITGLYETRIDLSQLGGD

SEQ ID NO: 1716 - protein, 222 aa, Streptococcus gallolyticus
SVFVIADVEKGKAKKLKTVKELVGISIMERSSFEENPVVFLEKKGYQNVQEDNLIKLPKYSLFEFEGGRRRLLASASELQKGNEVVLSRHLVELLYHAHRVNSFNNSEHLKYVSEHKKEFGEVLSCVENFAKSYVDVEKNLGKIRAVADKIDTFSIEDISISFVNLLTLTALGAPADFNFLGEKIPRKRYTSTKECLNATLIHQSITGLYETRIDLSKLGEE

SEQ ID NO: 1717 - protein, 173 aa, Streptococcus gordonii
NTVALLSLNPWRTDVYYNSETKKYEFLGLKYADLCFEEGGAYGISEVKYKKIREKEGIGKNSEFKFTLYKNDLILIKDTETNCQQFFRFWSRTGKDNPKSFEKHKIELKPYEKAKFEKGEELKVLGKVPPSSNQFQKNMQIENLSIYKVKTDILGNKHFIKKEGDEPKLKFKK

SEQ ID NO: 1718 - protein, 222 aa, Streptococcus mutans
SILVIADIEKGKSKKLKTVKALVGVTIMEKMTFERDPVAFLERKGYRNVQEENIIKLPKYSLFKLENGRKRLLASARELQKGNEIVLPNHLGTLLYHAKNIHKVDEPKHLDYVDKHKDEFKELLDVVSNFSKKYTLAEGNLEKIKELYAQNNGEDLKELASSFINLLTFTAIGAPATFKFFDKNIDRKRYTSTTEILNATLIHQSITGLYETRIDLSKLGGD

SEQ ID NO: 1719 - protein, 158 aa, Streptococcus salivarius
PWRADVYFNKTTGKYEILGLKYADLKFEKGTGTYKISEEKYNDIKIKEGVDSDSEFKFTLYKNDLLLIKDTETKEQQLFRFLSRTMPNVKHYVELKPYDKQKFDDNEELIKILGIVAKGGQCKKGVSKPNISIYKIRTDVLGNQHIIKNEGDKPKLDF

SEQ ID NO: 1720 - protein, 159 aa, Streptococcus suis
PWRTDVYFNKETGKYEFLGIKYSDLSFEKGTGEYGISQEKYDSIKIAEGVAKKSIFKFTLYKQDLLFIKDIENNFGKLLRFTSKNDTSKHYVELKPYDKNKFGTEEPLLPVLGNVAKSGQCIKGLNKSNISIYKVRTDILGYRHFIKQEGEHPQLKFKK

SEQ ID NO: 1721 - protein, 158 aa, Streptococcus thermophilus
PWRTDVYFNKNTGKYEILGLKYADLQFEKKTGTYKISQEKYNGIMKEEGVDSDSEFKFTLYKNDLLLVKDTETKEQQLFRFLSRTMPNVKYYVELKPYSKDKFEKNESLIEILGSADKSGRCIKGLGKSNISIYKVRTDVLGNQHIIKNEGDKPKLDF

SEQ ID NO: 1722 - protein, 260 aa, Treponema denticola
YTLIEYEEKGNKIRSLETIPLYLVKDIQKDQDVLKSYLTDLLGKKEFKILVPKIKINSLLKINGFPCHITGKTNDSFLLRPAVQFCCSNNEVLYFKKIIRFSEIRSQREKIGKTISPYEDLSFRSYIKENLWKKTKNDEIGEKEFYDLLQKKNLEIYDMLLTKHKDTIYKKRPNSATIDILVKGKEKFKSLIIENQFEVILEILKLFSATRNVSDLQHIGGSKYSGVAKIGNKISSLDNCILIYQSITGIFEKRIDLLKV

SEQ ID NO: 1723 - protein, 209 aa, Lactobacillus animalis
AVLITADEVKKGKTKKVKTLVNIPIIDSKKYEADPTAYLASRGYTNVTNSFILPKYSLLEDPEGRRRYLASFKEFQKANELILPQHLVELLYWVNAKDGEQKLEDHKAEFKELFDKIMEFADKYVVAPKNSEKIRRLYEENQDATPMELGKNFVELLRYTADGAASDFKFFGENIPRKRYNSAGSLLNGTLIYQSKTGLYETRIDLGKL

SEQ ID NO: 1724 - protein, 245 aa, Lactobacillus ceti
YSIYKYTYMKKKECMEEFLLVPIPIHLVNNDEELPKYINDKIAERAKKKKLETVECIVKELYQGTLVRINGYDYRIAGSSGKQFELHNGINLIVEPWVEKVLKETDKFVRKSNSKLDKKQQKENTTETLIEKQLNDVFEYLCRKLNQGIFKNNKHTLPAKLLGDSIQKRFEDASIEDEFEVIKELISAIAKNPQNFKTIQKVLDISGSSIPRFNLKLTKNNVDEFIIKNESVTGLFTHEKVIFRK

SEQ ID NO: 1725 - protein, 251 aa, Tissierellia bacterium
FVLFKYEEKGKEKIGFDSITIAYKERLKKNLDIEKFLENKGYKNSKLIRKIFKNQKVLINGYPYLLKSFNKQSQIKFNNFKILYLNENNLKFAKDAIKFEKNNANVDLKKQKYIVSFLKKKKQNEINETYEECIDRLNDEFDTLFLKLCDIQKSSIYTNYKLQDFSSNKKSIEIKDKFDIFKSLDLYKKSKLIKEFLNYYKYEKNDLDFSLIDIDKKANCIQKHFTEDLVKDFVIVDESVTGLFVKKERLK

SEQ ID NO: 1726 - protein, 240 aa, Veillonella parvula
SIIVQYTGKKGEVIKEIVPLPIYLTNRNTTDQDLINYVASIIPQAKDISIIYGKLCINQLVKVNGFYYYLGGKTNSKFCIDNAIQVIVSNEWIPYLKVLEKFNNMRKDNKDLKANVVSTRALDNKHTIEVRIVEEKNIEFFDYLVSKLKMPIYQKMKGNKAAELSEKGYGLFKKMSLEEQSIHLIELLNLLTNQKTTFEVKPLGITASRSTVGSKISNQDEFKVINESITGLYSNEVTIV

SEQ ID NO: 1727 - protein, 133 aa, unidentified
HHVMIYKDSDGQLKESIVTLWEAAERKNQGNSVYQLPPDGLEVVSTLAVNDMFLLGLETEQNKDIKKLDYQILSKHLYRVQKLSSMYYTFRHHLASTVTNSDEEFSIRSFGTWEKVNPIRVKVNQIGEVIRSL

SEQ ID NO: 1728 - protein, 212 aa, Enterococcus faecalis
TVLFTHEKGKKPLIKQEILGITIMEKTRFEQNPILFLEEKGFLRPRVLMKLPKYTLYEFPEGRRRLLASAKEAQKGNQMVLPEHLLTLLYHAKQCLLPNQSESLAYVEQHQPEFQEILERVVDFAEVHTLAKSKVQQIVKLFEANQTADVKEIAASFIQLMQFNAMGAPSTFKFFQKDIERARYTSIKEIFDATIIYQSTTGLYETRRKVVD

SEQ ID NO: 1729 - protein, 87 aa, Streptococcus gallolyticus
NDLIKLNGDLYKIIGVNSDDRNIIELDYYDIKYKDYCEINNIKGEPRIKKTIGKKTESIEKFTTDVLGNLYLHSTEKAPQLIFKRGL

SEQ ID NO: 1730 - protein, 145 aa, Staphylococcus pasteuri
KCNPFEEYRRENGLVCKYSKKGKGTPIKSLKYYDKKLGNCIDITPEGSKNEVVLQSLNPWRADVYFNPETLKYELLGLKYSDLSFEKGTGKYHISQEKYDVIKEKEGIGKKSEFKFTLYRNDLILIKDTASGEQEIYRFLSRTMP

SEQ ID NO: 1731 - DNA, 31 bp, synthetic construct
  misc_feature 1..31: note = Adapter A1
  source 1..31: mol_type = other DNA
cggcattcctgctgaaccgctcttccgatct

SEQ ID NO: 1732 - DNA, 30 bp, synthetic construct
  misc_feature 1..30: note = Adapter A2
  source 1..30: mol_type = other DNA
gatcggaagagcggttcagcaggaatgccg

SEQ ID NO: 1733 - DNA, 22 bp, synthetic construct
  misc_feature 1..22: note = R0 primer
  source 1..22: mol_type = other DNA
gccagggttttcccagtcacga

SEQ ID NO: 1734 - DNA, 28 bp, synthetic construct
  misc_feature 1..28: note = C0 primer
  source 1..28: mol_type = other DNA
gaaattctaaacgctaaagaggaagagg

SEQ ID NO: 1735 - DNA, 56 bp, synthetic construct
  misc_feature 1..56: note = F1 primer
  source 1..56: mol_type = other DNA
ctacactctttccctacacgacgctcttccgatctaaggcggcattcctgctgaac

SEQ ID NO: 1736 - DNA, 49 bp, synthetic construct
  misc_feature 1..49: note = R1 primer
  source 1..49: mol_type = other DNA
caagcagaagacggcatacgagctcttccgatctcggcgacgttgggtc

SEQ ID NO: 1737 - DNA, 35 bp, synthetic construct
  misc_feature 1..35: note = 5' end bridge amplification sequence
  source 1..35: mol_type = other DNA
ctacactctttccctacacgacgctcttccgatct

SEQ ID NO: 1738 - DNA, 34 bp, synthetic construct
  misc_feature 1..34: note = 3' end bridge amplification sequence
  source 1..34: mol_type = other DNA
caagcagaagacggcatacgagctcttccgatct

SEQ ID NO: 1739 - DNA, 43 bp, synthetic construct
  misc_feature 1..43: note = F2 primer
  source 1..43: mol_type = other DNA
aatgatacggcgaccaccgagatctacactctttccctacacg

SEQ ID NO: 1740 - DNA, 18 bp, synthetic construct
  misc_feature 1..18: note = R2 primer
  source 1..18: mol_type = other DNA
caagcagaagacggcata

SEQ ID NO: 1741 - DNA, 60 bp, synthetic construct
  misc_feature 1..60: note = C1 primer
  source 1..60: mol_type = other DNA
ctacactctttccctacacgacgctcttccgatctggaataaacgctaaagaggaagagg

SEQ ID NO: 1742 - DNA, 13 bp, synthetic construct
  misc_feature 1..13: note = sequence product
  source 1..13: mol_type = other DNA
cttccgatctaca

SEQ ID NO: 1743 - DNA, 10 bp, synthetic construct
  misc_feature 1..10: note = adapter and target sequences of sequence produced
  source 1..10: mol_type = other DNA
cttccgatct

SEQ ID NO: 1744 - DNA, 10 bp, synthetic construct
  misc_feature 1..10: note = 5' sequence upstream of the PAM
  source 1..10: mol_type = other DNA
agttgaccca

SEQ ID NO: 1745 - skipped

SEQ ID NO: 1746 - DNA, 76 bp, Clostridium perfringens
  source 1..76: mol_type = unassigned DNA
ctagataatttcagcggcaaattattaactgggatgtgaactgacgagggaaaatggcttacagatcttttgcttt

SEQ ID NO: 1747 - DNA, 76 bp, synthetic construct
  misc_feature 1..76: note = Cleavage mutant
  source 1..76: mol_type = other DNA
ctagataatttcagcggcaaattattaactgggatgtgaactgacgagggaaaattggcttacagatcttttgctt

SEQ ID NO: 1748 - DNA, 75 bp, synthetic construct
  misc_feature 1..75: note = Cleavage mutant
  source 1..75: mol_type = other DNA
ctagataatttcagcggcaaattattaactgggatgtgaactgacgagggaaaaggcttacagatcttttgcttt

SEQ ID NO: 1749 - DNA, 76 bp, synthetic construct
  misc_feature 1..76: note = Cleavage mutant
  source 1..76: mol_type = other DNA
ctagataatttcagcggcaaattattaactgggatgtgaactgacgagggaaaaatggcttacagatcttttgctt

SEQ ID NO: 1750 - DNA, 76 bp, synthetic construct
  misc_feature 1..76: note = Cleavage mutant
  source 1..76: mol_type = other DNA
ctagataatttcagcggcaaattattaactgggatgtgaactgacgagggaaaagtggcttacagatcttttgctt

SEQ ID NO: 1751 - DNA, 74 bp, synthetic construct
  misc_feature 1..74: note = Cleavage mutant
  source 1..74: mol_type = other DNA
ctagataatttcagcggcaaattattaactgggatgtgaactgacgagggaatggcttacagatcttttgcttt

SEQ ID NO: 1752 - DNA, 76 bp, synthetic construct
  misc_feature 1..76: note = Cleavage mutant
  source 1..76: mol_type = other DNA
ctagataatttcagcggcaaattattaactgggatgtgaactgacgagggaaaactggcttacagatcttttgctt

SEQ ID NO: 1753 - DNA, 55 bp, synthetic construct
  misc_feature 1..55: note = Cleavage mutant
  source 1..55: mol_type = other DNA
ctagataatttcagcggcaaattattaactgggatgtgaacagatcttttgcttt

SEQ ID NO: 1754 - DNA, 74 bp, synthetic construct
  misc_feature 1..74: note = Cleavage mutant
  source 1..74: mol_type = other DNA
ctagataatttcagcggcaaattattaactgggatgtgaactgacgagggaaaggcttacagatcttttgcttt

SEQ ID NO: 1755 - DNA, 76 bp, synthetic construct
  misc_feature 1..76: note = Cleavage mutant
  source 1..76: mol_type = other DNA
ctagataatttcagcggcaaattattaactgggatgtgaactgacgagggaaaatggactacagatcttttgcttt

SEQ ID NO: 1756 - DNA, 74 bp, synthetic construct
  misc_feature 1..74: note = Cleavage mutant
  source 1..74: mol_type = other DNA
ctagataatttcagcggcaaattattaactgggatgtgaactgacgagggaaaagcttacagatcttttgcttt

SEQ ID NO: 1757 - DNA, 51 bp, synthetic construct
  misc_feature 1..51: note = Cleavage mutant
  source 1..51: mol_type = other DNA
ctagataatttcagcggcaaattattaactggcttacagatcttttgcttt

SEQ ID NO: 1758 - DNA, 72 bp, synthetic construct
  misc_feature 1..72: note = Cleavage mutant
  source 1..72: mol_type = other DNA
ctagataatttcagcggcaaattattaactgggatgtgaactgacgagggaaaattacagatcttttgcttt

SEQ ID NO: 1759 - DNA, 73 bp, synthetic construct
  misc_feature 1..73: note = Cleavage mutant
  source 1..73: mol_type = other DNA
ctagataatttcagcggcaaattattaactgggatgtgaactgacgagggatggcttacagatcttttgcttt

SEQ ID NO: 1760 - DNA, 69 bp, synthetic construct
  misc_feature 1..69: note = Cleavage mutant
  source 1..69: mol_type = other DNA
ctagataatttcagcggcaaattattaactgggatgtgaactgacgagggcttacagatcttttgcttt

SEQ ID NO: 1761 - DNA, 58 bp, synthetic construct
  misc_feature 1..58: note = Cleavage mutant
  source 1..58: mol_type = other DNA
ctagataatttcagcggcaaattattaactgggatgtggcttacagatcttttgcttt

SEQ ID NO: 1762 - DNA, 73 bp, synthetic construct
  misc_feature 1..73: note = Cleavage mutant
  source 1..73: mol_type = other DNA
ctagataatttcagcggcaaattattaactgggatgtgaactgacgagggaaaacttacagatcttttgcttt

SEQ ID NO: 1763 - DNA, 73 bp, synthetic construct
  misc_feature 1..73: note = Cleavage mutant
  source 1..73: mol_type = other DNA
ctagataatttcagcggcaaattattaactgggatgtgaactgacgagggaaggcttacagatcttttgcttt

SEQ ID NO: 1764 - DNA, 63 bp, synthetic construct
  misc_feature 1..63: note = Cleavage mutant
  source 1..63: mol_type = other DNA
ctagataatttcagcggcaaattattaactgggatgtgaactggcttacagatcttttgcttt

SEQ ID NO: 1765 - DNA, 69 bp, synthetic construct
  misc_feature 1..69: note = Cleavage mutant
  source 1..69: mol_type = other DNA
ctagataatttcagcggcaaattattaactgggatgtgaactgacgatggcttacagatcttttgcttt

SEQ ID NO: 1766 - DNA, 52 bp, synthetic construct
  misc_feature 1..52: note = Cleavage mutant
  source 1..52: mol_type = other DNA
ctagataatttcagcggcaaattattaactgggcttacagatcttttgcttt

SEQ ID NO: 1767 - DNA, 76 bp, Streptococcus equinus
  source 1..76: mol_type = unassigned DNA
ttcctcagctgctccaccgttgcgccgatgactggccatgatctcgggcctttctgcttcctcaggctccacctct

SEQ ID NO: 1768 - DNA, 76 bp, synthetic construct
  misc_feature 1..76: note = Cleavage mutant
  source 1..76: mol_type = other DNA
ttcctcagctgctccaccgttgcgccgatgactggccatgatctcgggcctttctgcttacctcaggctccacctc

SEQ ID NO: 1769 - DNA, 76 bp, synthetic construct
  misc_feature 1..76: note = Cleavage mutant
  source 1..76: mol_type = other DNA
ttcctcagctgctccaccgttgcgccgatgactggccatgatctcgggcctttctgctttcctcaggctccacctc

SEQ ID NO: 1770 - DNA, 75 bp, synthetic construct
  misc_feature 1..75: note = Cleavage mutant
  source 1..75: mol_type = other DNA
ttcctcagctgctccaccgttgcgccgatgactggccatgatctcgggcctttctgcttctcaggctccacctct

SEQ ID NO: 1771 - DNA, 75 bp, synthetic construct
  misc_feature 1..75: note = Cleavage mutant
  source 1..75: mol_type = other DNA
ttcctcagctgctccaccgttgcgccgatgactggccatgatctcgggcctttctgctcctcaggctccacctct

SEQ ID NO: 1772 - DNA, 72 bp, synthetic construct
  misc_feature 1..72: note = Cleavage mutant
  source 1..72: mol_type = other DNA
ttcctcagctgctccaccgttgcgccgatgactggccatgatctcgggcctttctgcttaggctccacctct

SEQ ID NO: 1773 - DNA, 73 bp, synthetic construct
  misc_feature 1..73: note = Cleavage mutant
  source 1..73: mol_type = other DNA
ttcctcagctgctccaccgttgcgccgatgactggccatgatctcgggcctttctgcttcaggctccacctct

SEQ ID NO: 1774 - DNA, 76 bp, synthetic construct
  misc_feature 1..76: note = Cleavage mutant
  source 1..76: mol_type = other DNA
ttcctcagctgctccaccgttgcgccgatgactggccatgatctcgggcctttctgcttccctcaggctccacctc

SEQ ID NO: 1775 - DNA, 73 bp, synthetic construct
  misc_feature 1..73: note = Cleavage mutant
  source 1..73: mol_type = other DNA
ttcctcagctgctccaccgttgcgccgatgactggccatgatctcgggcctttctgcctcaggctccacctct

SEQ ID NO: 1776 - DNA, 72 bp, synthetic construct
  misc_feature 1..72: note = Cleavage mutant
  source 1..72: mol_type = other DNA
ttcctcagctgctccaccgttgcgccgatgactggccatgatctcgggcctttctgctcaggctccacctct

SEQ ID NO: 1777 - DNA, 76 bp, synthetic construct
  misc_feature 1..76: note = Cleavage mutant
  source 1..76: mol_type = other DNA
ttcctcagctgctccaccgttgcgccgatgactggccatgatctcgggcctttctgcttttcctcaggctccacct

SEQ ID NO: 1778 - DNA, 71 bp, synthetic construct
  misc_feature 1..71: note = Cleavage mutant
  source 1..71: mol_type = other DNA
ttcctcagctgctccaccgttgcgccgatgactggccatgatctcgggcctttctgcttggctccacctct

SEQ ID NO: 1779 - DNA, 74 bp, synthetic construct
  misc_feature 1..74: note = Cleavage mutant
  source 1..74: mol_type = other DNA
ttcctcagctgctccaccgttgcgccgatgactggccatgatctcgggcctttctgctttcaggctccacctct

SEQ ID NO: 1780 - DNA, 58 bp, synthetic construct
  misc_feature 1..58: note = Cleavage mutant
  source 1..58: mol_type = other DNA
ttcctcagctgctccaccgttgcgccgatgactggccatgacctcaggctccacctct

SEQ ID NO: 1781 - DNA, 70 bp, synthetic construct
  misc_feature 1..70: note = Cleavage mutant
  source 1..70: mol_type = other DNA
ttcctcagctgctccaccgttgcgccgatgactggccatgatctcgggcctttcctcaggctccacctct

SEQ ID NO: 1782 - DNA, 66 bp, synthetic construct
  misc_feature 1..66: note = Cleavage mutant
  source 1..66: mol_type = other DNA
ttcctcagctgctccaccgttgcgccgatgactggccatgatctcgggcctttctgctccacctct

SEQ ID NO: 1783 - DNA, 58 bp, synthetic construct
  misc_feature 1..58: note = Cleavage mutant
  source 1..58: mol_type = other DNA
ttcctcagctgctccaccgttgcgccgatgactggccatgatctcaggctccacctct

SEQ ID NO: 1784 - DNA, 67 bp, synthetic construct
  misc_feature 1..67: note = Cleavage mutant
  source 1..67: mol_type = other DNA
ttcctcagctgctccaccgttgcgccgatgactggccatgatctcgggcctttctgcctccacctct

SEQ ID NO: 1785 - DNA, 64 bp, synthetic construct
  misc_feature 1..64: note = Cleavage mutant
  source 1..64: mol_type = other DNA
ttcctcagctgctccaccgttgcgccgatgactggccatgatctcgggcctttctgccacctct

SEQ ID NO: 1786 - DNA, 70 bp, synthetic construct
  misc_feature 1..70: note = Cleavage mutant
  source 1..70: mol_type = other DNA
ttcctcagctgctccaccgttgcgccgatgactggccatgatctcgggcctttctgcttgctccacctct

SEQ ID NO: 1787 - DNA, 55 bp, synthetic construct
  misc_feature 1..55: note = Cleavage mutant
  source 1..55: mol_type = other DNA
ttcctcagctgctccaccgttgcgccgatgactggccatgatctcgggcctttct

SEQ ID NO: 1788 - DNA, 79 bp, Nitratifractor salsuginis
  source 1..79: mol_type = unassigned DNA
gtaatcgaactgtgggttcccgccacgttcagaatggcttggactcaagtgtaaatgtacagggttcagttttgtaata

SEQ ID NO: 1789 - DNA, 79 bp, synthetic construct
  misc_feature 1..79: note = Cleavage mutant
  source 1..79: mol_type = other DNA
gtaatcgaactgtgggttcccgccacgttcagaatggcttggactcaagtgtaaattgtacagggttcagttttgtaat

SEQ ID NO: 1790 - DNA, 79 bp, synthetic construct
  misc_feature 1..79: note = Cleavage mutant
  source 1..79: mol_type = other DNA
gtaatcgaactgtgggttcccgccacgttcagaatggcttggactcaagtgtaaatatgtacagggttcagttttgtaa

SEQ ID NO: 1791 - DNA, 73 bp, synthetic construct
  misc_feature 1..73: note = Cleavage mutant
  source 1..73: mol_type = other DNA
gtaatcgaactgtgggttcccgccacgttcagaatggcttggactcaagtgtacagggttcagttttgtaata

SEQ ID NO: 1792 - DNA, 78 bp, synthetic construct
  misc_feature 1..78: note = Cleavage mutant
  source 1..78: mol_type = other DNA
gtaatcgaactgtgggttcccgccacgttcagaatggcttggactcaagtgtaatgtacagggttcagttttgtaata

SEQ ID NO: 1793 - DNA, 79 bp, synthetic construct
  misc_feature 1..79: note = Cleavage mutant
  source 1..79: mol_type = other DNA
gtaatcgaactgtgggttcccgccacgttcagaatggcttggactcaagtgtaaaatgtacagggttcagttttgtaat

SEQ ID NO: 1794 - DNA, 77 bp, synthetic construct
  misc_feature 1..77: note = Cleavage mutant
  source 1..77: mol_type = other DNA
gtaatcgaactgtgggttcccgccacgttcagaatggcttggactcaagtgtaaatacagggttcagttttgtaata

SEQ ID NO: 1795 - DNA, 79 bp, synthetic construct
  misc_feature 1..79: note = Cleavage mutant
  source 1..79: mol_type = other DNA
gtaatcgaactgtgggttcccgccacgttcagaatggcttggactcaagtgtaaatttgtacagggttcagttttgtaa

SEQ ID NO: 1796 - DNA, 79 bp, synthetic construct
  misc_feature 1..79: note = Cleavage mutant
  source 1..79: mol_type = other DNA
gtaatcgaactgtgggttcccgccacgttcagaatggcttggactcaagtgtaaattgtccagggttcagttttgtaat

SEQ ID NO: 1797 - DNA, 77 bp, synthetic construct
  misc_feature 1..77: note = Cleavage mutant
  source 1..77: mol_type = other DNA
gtaatcgaactgtgggttcccgccacgttcagaatggcttggactcaagtgtatgtacagggttcagttttgtaata

SEQ ID NO: 1798 - DNA, 72 bp, synthetic construct
  misc_feature 1..72: note = Cleavage mutant
  source 1..72: mol_type = other DNA
gtaatcgaactgtgggttcccgccacgttcagaatggcttggactcaatgtacagggttcagttttgtaata

SEQ ID NO: 1799 - DNA, 64 bp, synthetic construct
  misc_feature 1..64: note = Cleavage mutant
  source 1..64: mol_type = other DNA
gtaatcgaactgtgggttcccgccacgttcagaatggcttggactcaagtgtaaatgtaccggg

SEQ ID NO: 1800 - DNA, 74 bp, synthetic construct
  misc_feature 1..74: note = Cleavage mutant
  source 1..74: mol_type = other DNA
gtaatcgaactgtgggttcccgccacgttcagaatggcttggactcaagtgtaaattttacagggtccagtttt

SEQ ID NO: 1801 - DNA, 75 bp, synthetic construct
  misc_feature 1..75: note = Cleavage mutant
  source 1..75: mol_type = other DNA
gtaatcgaactgtgggttcccgccacgttcagaatggcttggactcaagtgtgtacagggttcagttttgtaata

SEQ ID NO: 1802 - DNA, 70 bp, synthetic construct
  misc_feature 1..70: note = Cleavage mutant
  source 1..70: mol_type = other DNA
gtaatcgaactgtgggttcccgccacgttcagaatggcttggactctgtacagggttcagttttgtaata

SEQ ID NO: 1803 - DNA, 76 bp, synthetic construct
  misc_feature 1..76: note = Cleavage mutant
  source 1..76: mol_type = other DNA
gtaatcgaactgtgggttcccgccacgttcagaatggcttggactcaagtgtaaatcagggttcagttttgtaata

SEQ ID NO: 1804 - DNA, 79 bp, synthetic construct
  misc_feature 1..79: note = Cleavage mutant
  source 1..79: mol_type = other DNA
gtaatcgaactgtgggttcccgccacgttcagaatggcttggactcaagtgtaaatgtgtacagggttcagttttgtaa

SEQ ID NO: 1805 - DNA, 78 bp, synthetic construct
  misc_feature 1..78: note = Cleavage mutant
  source 1..78: mol_type = other DNA
gtaatcgaactgtgggttcccgccacgttcagaatggcttggactcaagtgtaaataaaaaaaattctgatctgtaaa

SEQ ID NO: 1806 - DNA, 79 bp, synthetic construct
  misc_feature 1..79: note = Cleavage mutant
  source 1..79: mol_type = other DNA
gtaatcgaactgtgggttcccgccacgttcagaatggcttggactcaagtgtaaattatgtacagggttcagttttgta

SEQ ID NO: 1807 - DNA, 77 bp, synthetic construct
  misc_feature 1..77: note = Cleavage mutant
  source 1..77: mol_type = other DNA
gtaatcgaactgtgggttcccgccacgttcagaatggcttggactcaagtgtaagtacagggttcagttttgtaata

SEQ ID NO: 1808 - DNA, 78 bp, synthetic construct
  misc_feature 1..78: note = Cleavage mutant
  source 1..78: mol_type = other DNA
gtaatcgaactgtgggttcccgccacgttcagaatggcttggactcaagtgtaaattacagggttcagttttgtaata

SEQ ID NO: 1809 - DNA, 80 bp, Turicibacter sp.
  source 1..80: mol_type = unassigned DNA
cccagaggtatccagcagaggggagaagaaagagagatgtagggctagaggggtgaggctgaaacagtgacctgtcttgg

SEQ ID NO: 1810 - DNA, 79 bp, synthetic construct
  misc_feature 1..79: note = Cleavage mutant
  source 1..79: mol_type = other DNA
cccagaggtatccagcagaggggagaagaaagagagatgtagggctagaggggtgaaaaaaaagccccagtgaggggct

SEQ ID NO: 1811 - DNA, 74 bp, synthetic construct
  misc_feature 1..74: note = Cleavage mutant
  source 1..74: mol_type = other DNA
cccagaggtatccagcagaggggagaagaaagagagatgtagggctagagggctgaaacagtgacctgtcttgg

SEQ ID NO: 1812 - DNA, 79 bp, synthetic construct
  misc_feature 1..79: note = Cleavage mutant
  source 1..79: mol_type = other DNA
cccagaggtatccagcagaggggagaagaaagagagatgtagggctagaggggtgggctgaaacagtgacctgtcttgg

SEQ ID NO: 1813 - DNA, 80 bp, synthetic construct
  misc_feature 1..80: note = Cleavage mutant
  source 1..80: mol_type = other DNA
cccagaggtatccagcagaggggagaagaaagagagatgtagggctagaggggtgatggctgaaacagtgacctgtcttg

SEQ ID NO: 1814 - DNA, 74 bp, synthetic construct
  misc_feature 1..74: note = Cleavage mutant
  source 1..74: mol_type = other DNA
cccagaggtatccagcagaggggagaagaaagagagatgtagggctagaggggtgaaacagtgacctgtcttgg

SEQ ID NO: 1815 - DNA, 80 bp, synthetic construct
  misc_feature 1..80: note = Cleavage mutant
  source 1..80: mol_type = other DNA
cccagaggtatccagcagaggggagaagaaagagagatgtagggctagaggggtgaaggctgaaacagtgacctgtcttg

SEQ ID NO: 1816 - DNA, 80 bp, synthetic construct
  misc_feature 1..80: note = Cleavage mutant
  source 1..80: mol_type = other DNA
cccagaggtatccagcagaggggagaagaaagagagatgtagggctagaggggtgacggctgaaacagtgacctgtcttg

SEQ ID NO: 1817 - DNA, 79 bp, synthetic construct
  misc_feature 1..79: note = Cleavage mutant
  source 1..79: mol_type = other DNA
cccagaggtatccagcagaggggagaagaaagagagatgtagggctagaggggtgaaaaaaagccccagtgaggggctg

SEQ ID NO: 1818 - DNA, 78 bp, synthetic construct
  misc_feature 1..78: note = Cleavage mutant
  source 1..78: mol_type = other DNA
cccagaggtatccagcagaggggagaagaaagagagatgtagggctagaggggtggctgaaacagtgacctgtcttgg

SEQ ID NO: 1819 - DNA, 79 bp, synthetic construct
  misc_feature 1..79: note = Cleavage mutant
  source 1..79: mol_type = other DNA
cccagaggtatccagcagaggggagaagaaagagagatgtagggctagaggggtgaaaggctttatgccgaaatcagcc

SEQ ID NO: 1820 - DNA, 79 bp, synthetic construct
  misc_feature 1..79: note = Cleavage mutant
  source 1..79: mol_type = other DNA
cccagaggtatccagcagaggggagaagaaagagagatgtagggctagaggggtgagctgaaacagtgacctgtcttgg

SEQ ID NO: 1821 - DNA, 66 bp, synthetic construct
  misc_feature 1..66: note = Cleavage mutant
  source 1..66: mol_type = other DNA
cccagaggtatccagcagaggggagaagaaagagagatgtagggctgaaacagtgacctgtcttgg

SEQ ID NO: 1822 - DNA, 66 bp, synthetic construct
  misc_feature 1..66: note = Cleavage mutant
  source 1..66: mol_type = other DNA
cccagaggtatccagcagaggggagaagaaagagagatgtagggctagaggggtgacctgtcttgg

SEQ ID NO: 1823 - DNA, 73 bp, synthetic construct
  misc_feature 1..73: note = Cleavage mutant
  source 1..73: mol_type = other DNA
cccagaggtatccagcagaggggagaagaaagagagatgtagggctagaggctgaaacagtgacctgtcttgg

SEQ ID NO: 1824 - DNA, 79 bp, synthetic construct
  misc_feature 1..79: note = Cleavage mutant
  source 1..79: mol_type = other DNA
cccagaggtatccagcagaggggagaagaaagagagatgtagggctagaggggtgaatccagcgccagcaataccggag

SEQ ID NO: 1825 - DNA, 79 bp, synthetic construct
  misc_feature 1..79: note = Cleavage mutant
  source 1..79: mol_type = other DNA
cccagaggtatccagcagaggggagaagaaagagagatgtagggctagaggggtgaggccttcccctgaggctgtgtgc

SEQ ID NO: 1826 - DNA, 70 bp, synthetic construct
  misc_feature 1..70: note = Cleavage mutant
  source 1..70: mol_type = other DNA
cccagaggtatccagcagaggggagaagaaagagagatgtagggctggctgaaacagtgacctgtcttgg

SEQ ID NO: 1827 - DNA, 79 bp, synthetic construct
  misc_feature 1..79: note = Cleavage mutant
  source 1..79: mol_type = other DNA
cccagaggtatccagcagaggggagaagaaagagagatgtagggctagaggggtgaaaccggttcggctggcaatctgt

SEQ ID NO: 1828 - DNA, 79 bp, synthetic construct
  misc_feature 1..79: note = Cleavage mutant
  source 1..79: mol_type = other DNA
cccagaggtatccagcagaggggagaagaaagagagatgtagggctagaggggtgactggcgatggcgttgatggggct

SEQ ID NO: 1829 - DNA, 79 bp, synthetic construct
  misc_feature 1..79: note = Cleavage mutant
  source 1..79: mol_type = other DNA
cccagaggtatccagcagaggggagaagaaagagagatgtagggctagaggggtgacagcatacaagggatgtgaagga

1. A synthetic composition comprising a heterologous target polynucleotide and a Cas polypeptide comprising at least 90% amino acid sequence identity with any one of SEQ ID Nos: 86-119, 121-170, or 511-1135 endonuclease, wherein the Cas endonuclease comprises at least one amino acid feature selected from the group consisting of.

2. The synthetic composition of claim 1, wherein the Cas polypeptide comprises a domain sharing 90% or greater identity with any of SEQ ID NOs: 1136-1730.

3. (canceled)

4. (canceled)

5. The synthetic composition of claim 1, wherein the Cas polypeptide is fused to a heterologous polypeptide.

6. The synthetic composition of claim 5, wherein the heterologous polypeptide comprises nuclease activity.

7. The synthetic composition of claim 5, wherein the heterologous polypeptide is a deaminase.

8. (canceled)

9. The synthetic composition of claim 1, wherein the Cas polypeptide has been modified to lack endonuclease activity.

10. The synthetic composition of claim 1, wherein the Cas polypeptide has been modified to nick a single strand of the target polynucleotide.

11. The synthetic composition of claim 1, wherein the Cas polypeptide has been modified to further comprise a heterologous nuclease domain, a transcriptional activator domain, a transcriptional repressor domain, an epigenetic modification domain, a cleavage domain, a nuclear localization signal, a cell-penetrating domain, a deaminase domain, a base editing domain, or a translocation domain.

12. A polynucleotide encoding the polypeptide of claim 1.

13. A plasmid comprising the polynucleotide of claim 12.

14. The plasmid of claim 13, further comprising an expression element operably linked to the polynucleotide encoding the Cas polypeptide.

15. The plasmid of claim 13, further comprising a gene encoding a selectable marker or a transgene.

16. The synthetic composition of claim 1, wherein the heterologous component is selected from the group consisting of: a heterologous polynucleotide, a heterologous polypeptide, a particle, a solid matrix, an antibody, Tris, EDTA, dithiothreitol (DTT), phosphate-buffered saline (PBS), sodium chloride, magnesium chloride, HEPES, glycerol, bovine serum albumin (BSA), a salt, an emulsifier, a detergent, a chelating agent, a proteinase, Proteinase K, a redox reagent, an antibody, nuclease-free water, a viscosity agent, and a Histidine tag.

17. The synthetic composition of claim 1, wherein the Cas polypeptide is in a liquid formulation.

18. The synthetic composition of claim 1, wherein the Cas polypeptide is in a lyophilized formulation.

19. (canceled)

20. The synthetic composition of claim 1, wherein the Cas polypeptide is in a formulation with a pH of between 1.0 and 14.0, between 2.0 and 13.0, between 3.0 and 12.0, between 4.0 and 11.0, between 5.0 and 10.0, between 6.0 and 9.0, between 7.0 and 8.0, between 4.5 and 6.5, between 5.5 and 7.5, or between 6.5 and 7.5.

21. The synthetic composition of claim 1, wherein the Cas polypeptide is stored or incubated at a temperature of at least minus 200 degrees Celsius, at least minus 150 degrees Celsius, at least minus 135 degrees Celsius, at least minus 90 degrees Celsius, at least minus 80 degrees Celsius, at least minus 20 degrees Celsius, at least 4 degrees Celsius, at least 17 degrees Celsius, at least 20 degrees Celsius, at least 25 degrees Celsius, at least 30 degrees Celsius, at least 35 degrees Celsius, at least 37 degrees Celsius, at least 39 degrees Celsius, at least 40 degrees Celsius, at least 45 degrees Celsius, at least 50 degrees Celsius, at least 55 degrees Celsius, at least 60 degrees Celsius, at least 65 degrees Celsius, at least 70 degrees Celsius, or greater than 70 degrees Celsius.

22. The synthetic composition of claim 1, wherein the Cas polypeptide is attached to a solid matrix.

23. The synthetic composition of claim 1, wherein the solid matrix is a particle.

24. A kit comprising the synthetic composition of claim 1.

25. The synthetic composition of claim 1, further comprising a guide polynucleotide.

26. The synthetic composition of claim 1, further comprising a heterologous cell.

27. The synthetic composition of claim 26, wherein the cell is obtained from a eukaryotic, prokaryotic, plant, or animal organism.

28. (canceled)

29. A method of creating a double strand break in a target polynucleotide, the method comprising contacting the target polynucleotide with a guide polynucleotide that shares complementarity with the target polynucleotide, and a Cas endonuclease comprising at least 90% amino acid sequence identity with any one of SEQ ID Nos: 86-119, 121-170, or 511-1135
wherein the Cas endonuclease and the guide RNA form a complex that recognizes, binds to, and cleaves the target polynucleotide.

30. (canceled)

31. The method of claim 29, wherein the double strand break comprises a sticky end overhang.

32. (canceled)

33. The method of claim 29, wherein the double strand break comprises a blunt end.

34. (canceled)

35. A method of modifying a DNA target site, the method comprising:
(a) contacting a polynucleotide comprising the DNA target site with a Cas polypeptide comprising at least 90% amino acid sequence identity with any one of SEQ ID Nos: 86-119, 121-170, or 511-1135,
(b) a guide polynucleotide that shares complementarity with a sequence in or near the DNA target site, wherein the Cas polypeptide and the guide RNA form a complex that recognizes, binds to, and nicks or cleaves the DNA target site; and
(c) detecting at least one modification at the DNA target site.

36. (canceled)

37. The method of claim 35, further comprising introducing a donor DNA molecule in step (a), wherein the donor DNA molecule is integrated into the DNA target site.

38. The method of claim 35, further comprising introducing a template DNA molecule in step (a), wherein the template DNA molecule directs the repair outcome of the DNA target site.

39. A method of editing at least one base of a target polynucleotide, comprising:
(a) contacting the target polynucleotide with:
(i) a deaminase,
(ii) a Cas polypeptide comprising at least 90% amino acid sequence identity with any one of SEQ ID Nos: 86-119, 121-170, or 511-1135, wherein the Cas polypeptide has been modified to lack nuclease activity, and
(iii) a guide polynucleotide that shares complementarity with a sequence of the target polynucleotide,
wherein the Cas polypeptide and the guide RNA form a complex that recognizes and binds to the target polynucleotide; and
(b) detecting at least one modification at the DNA target site.

40. (canceled)

41. A method of modifying the genome of a cell, the method comprising:
(a) introducing into the cell a guide polynucleotide that shares complementarity with a sequence in or near a DNA target site in the cell, and a heterologous Cas polypeptide comprising at least 90% amino acid sequence identity with any one of SEQ ID Nos: 86-119, 121-170, or 511-1135
wherein the Cas polypeptide and the guide polynucleotide form a complex that recognizes, binds to, and nicks or cleaves the DNA target site; and
(b) identifying at least one modification, as compared to an isoline cell not introduced to the Cas polypeptide and guide polynucleotide.

42. The method of claim 41, further comprising introducing a heterologous polynucleotide in step (a), wherein the heterologous polynucleotide is a donor DNA or a template DNA.

43. The method of claim 41, wherein the cell is removed from a source organism prior to step (a) and re-introduced into either the source organism or introduced into a new organism after step (a).

44. The method of claim 41, wherein the cell is placed in a medium that supports growth, and a tissue or organism is regenerated from the cell.

45. The method of claim 41, wherein the method of modifying the genome of the cell results in a benefit to an organism obtained or derived from the cell.

46. The method of claim 41, wherein the cell is selected from the group consisting of: a human, non-human primate, mammal, animal, archaeal, bacterial, protist, fungal, insect, yeast, non-conventional yeast, and plant cell.

47. The method of claim 45, wherein the organism is a plant.

48. The method of claim 47, wherein the plant is selected from the group consisting of maize, rice, sorghum, rye, barley, wheat, millet, oats, sugarcane, turfgrass, switchgrass, soybean, canola, alfalfa, sunflower, cotton, tobacco, peanut, potato, tobacco, Arabidopsis, vegetable, and safflower.

49. The method of claim 47, wherein the benefit is selected from the group consisting of: disease resistance, drought tolerance, heat tolerance, cold tolerance, salinity tolerance, metal tolerance, herbicide tolerance, improved water use efficiency, improved nitrogen utilization, improved nitrogen fixation, pest resistance, herbivore resistance, pathogen resistance, yield improvement, health enhancement, improved fertility, vigor improvement, growth improvement, photosynthetic capability improvement, nutrition enhancement, altered protein content, altered oil content, increased biomass, increased shoot length, increased root length, improved root architecture, modulation of a metabolite, modulation of the proteome, increased seed weight, altered seed carbohydrate composition, altered seed oil composition, altered seed protein composition, altered seed nutrient composition; as compared to an isoline plant not comprising said target site modification or as compared to the plant prior to the modification of said target site in said plant cell.

50. The method of claim 45, wherein the organism is an animal.

51. The method of claim 50, wherein the animal is a human.

52. The method of claim 50, wherein the animal cell is selected from the group consisting of: haploid cells, diploid cells, reproductive cells, neurons, muscle cells, endocrine or exocrine cells, epithelial cells, muscle cells, kidney cells, ovarian cells, tumor cells, embryonic cells, hematopoietic cells, bone cells, germ cells, somatic cells, stem cells, pluripotent stem cells, induced pluripotent stem cells, progenitor cells, meiotic cells, and mitotic cells.

53. (canceled)
